(19) United States
(12) Patent Application Publication
(10) Pub. No.: US 2020/0216522 A1
(43) Pub. Date: Jul. 9, 2020

(54) ANTI-TAU ANTIBODIES AND METHODS OF USE THEREOF

(71) Applicant: Denali Therapeutics Inc., South San Francisco, CA (US)

(72) Inventors: Xiaocheng Chen, South San Francisco, CA (US); Mark S. Dennis, South San Francisco, CA (US); Lesley Ann Kane, South San Francisco, CA (US); Do Jin Kim, South San Francisco, CA (US); Joseph W. Lewcock, South San Francisco, CA (US); Suresh Poda, South San Francisco, CA (US); Rishi Rakhit, South San Francisco, CA (US); Rinkan Shukla, South San Francisco, CA (US); Adam P. Silverman, South San Francisco, CA (US)

(73) Assignee: Denali Therapeutics Inc., South San Francisco, CA (US)

(21) Appl. No.: 16/543,367

(22) Filed: Aug. 16, 2019

Related U.S. Application Data
(63) Continuation of application No. PCT/US2018/018415, filed on Feb. 15, 2018.
(60) Provisional application No. 62/460,642, filed on Feb. 17, 2017.
(60) Provisional application No. 62/583,400, filed on Nov. 8, 2017.

(51) Int. Cl. C07K 16/18; A61P 25/28

(52) U.S. Cl. CPC C07K 16/18; A61P 25/28; C07K 2317/34; C07K 2317/31; C07K 2317/565; C07K 2317/33; A61K 2039/505; C07K 2317/24; C07K 2317/35; C07K 2317/54; C07K 2317/55; C07K 2317/622; C07K 2317/21

(57) ABSTRACT

In one aspect, antibodies that specifically bind to a human Tau protein are provided. In some embodiments, an anti-Tau antibody recognizes an epitope within residues 111-125 of full-length human Tau, an epitope within residues 251-270 and/or residues 346-360 of full-length human Tau, or an epitope within residues 186-205 of full-length human Tau. In some embodiments, an anti-Tau antibody specifically binds to phosphorylated human Tau, unphosphorylated human Tau, and/or multiple splice isoforms of human Tau. An anti-Tau antibody disclosed herein may also include one or two modified Fc polypeptides.

### CROSS-REFERENCE TO RELATED APPLICATIONS

[0001] The present application is a continuation of International Patent Application Serial No. PCT/US2018/018415, filed Feb. 15, 2018, which claims the benefit of and priority to U.S. Patent Application Ser. No. 62/460,642, filed Feb. 17, 2017, U.S. Patent Application Ser. No. 62/583,400, filed Nov. 8, 2017, the contents of which are incorporated herein by reference for all purposes.

### BACKGROUND OF THE INVENTION

[0002] Tau protein aggregation and neurofibrillary tangles are common features in a number of neurodegenerative diseases, including Alzheimer's disease and frontotemporal dementia. Tau is highly expressed in neurons and functions in stabilizing microtubules and aiding the assembly of tubulin in microtubules. Phosphorylation of Tau protein is a primary mechanism by which Tau function is regulated. However, abnormal hyperphosphorylation of Tau can result in Tau aggregation. It is believed that after the initiation of Tau aggregation, the aggregates act as templates (or “seeds”) for the misfolding of native Tau in the brain, resulting in the continued propagation of Tau aggregates and the formation of neurofibrillary tangles.

[0003] There remains a need for therapeutic agents that target Tau and that prevent Tau seeding and spreading.

### BRIEF SUMMARY OF THE INVENTION

[0004] In one aspect, antibodies (or antigen-binding portions thereof) that specifically bind to a human Tau protein are provided. In some embodiments, the antibody recognizes an epitope within residues 111-125 of SEQ ID NO:1. In some embodiments, the antibody recognizes an epitope comprising at least 6 amino acids within residues 111-125 of SEQ ID NO:1. In some embodiments, the antibody recognizes an epitope comprising at least 6 contiguous amino acids within residues 111-125 of SEQ ID NO: 1. In some embodiments, the antibody comprises one or more (e.g., one, two, three, four, five, or all six) complementarity determining regions (CDRs) selected from the group consisting of:
[0005] (a) a heavy chain CDR1 having at least 90% sequence identity (90%, 92%, 94%, 96%, 98%, 99%, or 100% sequence identity) to the amino acid sequence of SEQ ID NO:22 or having up to two amino acid substitutions relative to the amino acid sequence of SEQ ID NO:22;
[0006] (b) a heavy chain CDR2 having at least 90% sequence identity (90%, 92%, 94%, 96%, 98%, 99%, or 100% sequence identity) to the amino acid sequence of SEQ ID NO:23 or having up to two amino acid substitutions relative to the amino acid sequence of SEQ ID NO:23;
[0007] (c) a heavy chain CDR3 having at least 90% sequence identity (90%, 92%, 94%, 96%, 98%, 99%, or 100% sequence identity) to the amino acid sequence of SEQ ID NO:24 or having up to two amino acid substitutions relative to the amino acid sequence of SEQ ID NO:24;
[0008] (d) a light chain CDR1 having at least 90% sequence identity (90%, 92%, 94%, 96%, 98%, 99%, or 100% sequence identity) to the amino acid sequence of any one of SEQ ID NOS:26 and 42 or having up to two amino acid substitutions relative to the amino acid sequence of any one of SEQ ID NOS:26 and 42;
[0009] (e) a light chain CDR2 having at least 90% sequence identity (90%, 92%, 94%, 96%, 98%, 99%, or 100% sequence identity) to the amino acid sequence of any one of SEQ ID NOS:27, 43, and 50 or having up to two amino acid substitutions relative to the amino acid sequence of any one of SEQ ID NOS:27, 43, and 50; and
[0010] (f) a light chain CDR3 having at least 90% sequence identity (90%, 92%, 94%, 96%, 98%, 99%, or 100% sequence identity) to the amino acid sequence of any one of SEQ ID NOS:28, 44, 46, and 51 or having up to two amino acid substitutions relative to the amino acid sequence of any one of SEQ ID NOS:28, 44, 46, and 51.

[0011] In some embodiments, the antibody comprises one or more (e.g., one, two, three, four, five, or all six) CDRs selected from the group consisting of:
[0012] (a) a heavy chain CDR1 comprising the amino acid sequence of SEQ ID NO:22;
[0013] (b) a heavy chain CDR2 comprising the amino acid sequence of SEQ ID NO:23;
[0014] (c) a heavy chain CDR3 comprising the amino acid sequence of SEQ ID NO:24;
[0015] (d) a light chain CDR1 comprising the amino acid sequence of any one of SEQ ID NOS:26 and 42;
[0016] (e) a light chain CDR2 comprising the amino acid sequence of any one of SEQ ID NOS:27, 43, and 50; and
[0017] (f) a light chain CDR3 comprising the amino acid sequence of any one of SEQ ID NOS:28, 44, 46, and 51.

[0018] In some embodiments, the antibody comprises a heavy chain CDR1 comprising the amino acid sequence of SEQ ID NO:22, a heavy chain CDR2 comprising the amino acid sequence of SEQ ID NO:23, and a heavy chain CDR3 comprising the amino acid sequence of SEQ ID NO:24. In some embodiments, the antibody comprises a light chain CDR1 comprising the amino acid sequence of SEQ ID NO:26, a light chain CDR2 comprising the amino acid sequence of SEQ ID NO:27, and a light chain CDR3 comprising the amino acid sequence of SEQ ID NO:28. In some embodiments, the antibody comprises a heavy chain CDR1 comprising the amino acid sequence of SEQ ID NO:22, a heavy chain CDR2 comprising the amino acid sequence of SEQ ID NO:23, a heavy chain CDR3 comprising the amino acid sequence of SEQ ID NO:24, a light chain CDR1 comprising the amino acid sequence of SEQ ID NO:26, a light chain CDR2 comprising the amino acid sequence of SEQ ID NO:27, and a light chain CDR3 comprising the amino acid sequence of SEQ ID NO:28.

[0019] In some embodiments, the antibody comprises a heavy chain CDR1 comprising the amino acid sequence of SEQ ID NO:22, a heavy chain CDR2 comprising the amino acid sequence of SEQ ID NO:23, and a heavy chain CDR3 comprising the amino acid sequence of SEQ ID NO:24. In some embodiments, the antibody comprises a light chain CDR1 comprising the amino acid sequence of SEQ ID NO:42, a light chain CDR2 comprising the amino acid sequence of SEQ ID NO:43, and a light chain CDR3 comprising the amino acid sequence of SEQ ID NO:44. In some embodiments, the antibody comprises a heavy chain CDR1 comprising the amino acid sequence of SEQ ID NO:22, a heavy chain CDR2 comprising the amino acid sequence of SEQ ID NO:23, a heavy chain CDR3 comprising the amino acid sequence of SEQ ID NO:24, a light chain CDR1 comprising the amino acid sequence of SEQ ID NO:42, a light chain CDR2 comprising the amino acid sequence of SEQ ID NO:43, and a light chain CDR3 comprising the amino acid sequence of SEQ ID NO:44.

[0020] In some embodiments, the antibody comprises a heavy chain CDR1 comprising the amino acid sequence of SEQ ID NO:22, a heavy chain CDR2 comprising the amino acid sequence of SEQ ID NO:23, and a heavy chain CDR3 comprising the amino acid sequence of SEQ ID NO:24. In some embodiments, the antibody comprises a light chain CDR1 comprising the amino acid sequence of SEQ ID NO:42, a light chain CDR2 comprising the amino acid sequence of SEQ ID NO:43, and a light chain CDR3 comprising the amino acid sequence of SEQ ID NO:46. In some embodiments, the antibody comprises a heavy chain CDR1 comprising the amino acid sequence of SEQ ID NO:22, a heavy chain CDR2 comprising the amino acid sequence of SEQ ID NO:23, a heavy chain CDR3 comprising the amino acid sequence of SEQ ID NO:24, a light chain CDR1 comprising the amino acid sequence of SEQ ID NO:42, a light chain CDR2 comprising the amino acid sequence of SEQ ID NO:43, and a light chain CDR3 comprising the amino acid sequence of SEQ ID NO:46.

[0021] In some embodiments, the antibody comprises a heavy chain variable region comprising an amino acid sequence that has at least 90% sequence identity (90%, 92%, 94%, 96%, 98%, 99%, or 100% sequence identity) to any one of SEQ ID NOS:21 and 40. In some embodiments, the antibody comprises a light chain variable region comprising an amino acid sequence that has at least 90% sequence identity (90%, 92%, 94%, 96%, 98%, 99%, or 100% sequence identity) to any one of SEQ ID NOS:25, 41, and 45. In some embodiments, the antibody comprises a heavy chain variable region comprising an amino acid sequence that has at least 90% sequence identity (90%, 92%, 94%, 96%, 98%, 99%, or 100% sequence identity) to SEQ ID NO:21 and a light chain variable region comprising an amino acid sequence that has at least 90% sequence identity (90%, 92%, 94%, 96%, 98%, 99%, or 100% sequence identity) to SEQ ID NO:25. In some embodiments, the antibody comprises a heavy chain variable region comprising an amino acid sequence that has at least 90% sequence identity (90%, 92%, 94%, 96%, 98%, 99%, or 100% sequence identity) to SEQ ID NO:40 and a light chain variable region comprising an amino acid sequence that has at least 90% sequence identity (90%, 92%, 94%, 96%, 98%, 99%, or 100% sequence identity) to SEQ ID NO:41. In some embodiments, the antibody comprises a heavy chain variable region comprising an amino acid sequence that has at least 90% sequence identity (90%, 92%, 94%, 96%, 98%, 99%, or 100% sequence identity) to SEQ ID NO:40 and a light chain variable region comprising an amino acid sequence that has at least 90% sequence identity (90%, 92%, 94%, 96%, 98%, 99%, or 100% sequence identity) to SEQ ID NO:45.

[0022] In some embodiments, the antibody comprises one or more complementarity determining regions (CDRs) selected from the group consisting of:
[0023] (a) a heavy chain CDR1 having at least 90% sequence identity (90%, 92%, 94%, 96%, 98%, 99%, or 100% sequence identity) to the amino acid sequence of any one of SEQ ID NOS:22, 150-154, 420-437, 586, 587, 617, and 620 or having up to two amino acid substitutions relative to the amino acid sequence of any one of SEQ ID NOS:22, 150-154, 420-437, 586, 587, 617, and 620;
[0024] (b) a heavy chain CDR2 having at least 90% sequence identity (90%, 92%, 94%, 96%, 98%, 99%, or 100% sequence identity) to the amino acid sequence of any one of SEQ ID NOS:23, 438-443, 588, and 621 or having up to two amino acid substitutions relative to the amino acid sequence of any one of SEQ ID NOS:23, 438-443, 588, and 621;
[0025] (c) a heavy chain CDR3 having at least 90% sequence identity (90%, 92%, 94%, 96%, 98%, 99%, or 100% sequence identity) to the amino acid sequence of any one of SEQ ID NOS:24, 155, and 622 or having up to two amino acid substitutions relative to the amino acid sequence of any one of SEQ ID NOS:24, 155, and 622;
[0026] (d) a light chain CDR1 having at least 90% sequence identity (90%, 92%, 94%, 96%, 98%, 99%, or 100% sequence identity) to the amino acid sequence of any one of SEQ ID NOS:26, 156-158, 444-459, and 618 or having up to two amino acid substitutions relative to the amino acid sequence of any one of SEQ ID NOS:26, 156-158, 444-459, and 618;
[0027] (e) a light chain CDR2 having at least 90% sequence identity (90%, 92%, 94%, 96%, 98%, 99%, or 100% sequence identity) to the amino acid sequence of SEQ ID NO:27 and 623 or having up to two amino acid substitutions relative to the amino acid sequence of SEQ ID NO:27 and 623; and
[0028] (f) a light chain CDR3 having at least 90% sequence identity (90%, 92%, 94%, 96%, 98%, 99%, or 100% sequence identity) to the amino acid sequence of any one of SEQ ID NOS:28, 159-162, 460-462, 619, and 624 or having up to two amino acid substitutions relative to the amino acid sequence of any one of SEQ ID NOS:28, 159-162, 460-462, 619, and 624.

[0029] In some embodiments, the antibody comprises one or more CDRs selected from the group consisting of:
[0030] (a) a heavy chain CDR1 comprising the amino acid sequence of any one of SEQ ID NOS:22, 150-154, 420-437, 586, 587, 617, and 620;
[0031] (b) a heavy chain CDR2 comprising the amino acid sequence of any one of SEQ ID NOS:23, 438-443, 588, and 621;
[0032] (c) a heavy chain CDR3 comprising the amino acid sequence of any one of SEQ ID NOS:24, 155, and 622;
[0033] (d) a light chain CDR1 comprising the amino acid sequence of any one of SEQ ID NOS:26, 156-158, 444-459, and 618;
[0034] (e) a light chain CDR2 comprising the amino acid sequence of SEQ ID NO:27 and 623; and
[0035] (f) a light chain CDR3 comprising the amino acid sequence of any one of SEQ ID NOS:28, 159-162, 460-462, 619, and 624.

[0036] In some embodiments, the antibody comprises a heavy chain CDR1 comprising the amino acid sequence of any one of SEQ ID NOS:22, 150-154, 420-437, 586, 587, 617, and 620; a heavy chain CDR2 comprising the amino acid sequence of any one of SEQ ID NOS:23, 438-443, 588, and 621; and a heavy chain CDR3 comprising the amino acid sequence of any one of SEQ ID NOS:24, 155, and 622.

[0037] In some embodiments, the antibody comprises a light chain CDR1 comprising the amino acid sequence of any one of SEQ ID NOS:26, 156-158, 444-459, and 618; a light chain CDR2 comprising the amino acid sequence of SEQ ID NO:27 and 623; and a light chain CDR3 comprising the amino acid sequence of any one of SEQ ID NOS:28, 159-162, 460-462, 619, and 624.

[0038] In some embodiments, the antibody comprises a heavy chain CDR1 comprising the amino acid sequence of SEQ ID NO:22, a heavy chain CDR2 comprising the amino acid sequence of SEQ ID NO:23, a heavy chain CDR3 comprising the amino acid sequence of SEQ ID NO:24, a light chain CDR1 comprising the amino acid sequence of SEQ ID NO:450, a light chain CDR2 comprising the amino acid sequence of SEQ ID NO:27, and a light chain CDR3 comprising the amino acid sequence of SEQ ID NO:461.

[0039] In some embodiments, the antibody comprises a heavy chain CDR1 comprising the amino acid sequence of SEQ ID NO:22, a heavy chain CDR2 comprising the amino acid sequence of SEQ ID NO:23, a heavy chain CDR3 comprising the amino acid sequence of SEQ ID NO:24, a light chain CDR1 comprising the amino acid sequence of SEQ ID NO:459, a light chain CDR2 comprising the amino acid sequence of SEQ ID NO:27, and a light chain CDR3 comprising the amino acid sequence of SEQ ID NO:461.

[0040] In some embodiments, the antibody comprises a heavy chain CDR1 comprising the amino acid sequence of SEQ ID NO: 151, a heavy chain CDR2 comprising the amino acid sequence of SEQ ID NO:23, a heavy chain CDR3 comprising the amino acid sequence of SEQ ID NO:24, a light chain CDR1 comprising the amino acid sequence of SEQ ID NO:26, a light chain CDR2 comprising the amino acid sequence of any one of SEQ ID NO:27, and a light chain CDR3 comprising the amino acid sequence of SEQ ID NO:28.

[0041] In some embodiments, the antibody comprises a heavy chain CDR1 comprising the amino acid sequence of SEQ ID NO: 151, a heavy chain CDR2 comprising the amino acid sequence of SEQ ID NO:23, a heavy chain CDR3 comprising the amino acid sequence of SEQ ID NO:24, a light chain CDR1 comprising the amino acid sequence of SEQ ID NO:156, a light chain CDR2 comprising the amino acid sequence of SEQ ID NO:27, and a light chain CDR3 comprising the amino acid sequence of SEQ ID NO:28.

[0042] In some embodiments, the antibody comprises a heavy chain CDR1 comprising the amino acid sequence of SEQ ID NO: 151, a heavy chain CDR2 comprising the amino acid sequence of SEQ ID NO:23, a heavy chain CDR3 comprising the amino acid sequence of SEQ ID NO:24, a light chain CDR1 comprising the amino acid sequence of SEQ ID NO:158, a light chain CDR2 comprising the amino acid sequence of SEQ ID NO:27, and a light chain CDR3 comprising the amino acid sequence of SEQ ID NO:28.

[0043] In some embodiments, the antibody comprises a heavy chain CDR1 comprising the amino acid sequence of SEQ ID NO:22, a heavy chain CDR2 comprising the amino acid sequence of SEQ ID NO:23, a heavy chain CDR3 comprising the amino acid sequence of SEQ ID NO:24, a light chain CDR1 comprising the amino acid sequence of SEQ ID NO:158, a light chain CDR2 comprising the amino acid sequence of any one of SEQ ID NO:27, and a light chain CDR3 comprising the amino acid sequence of SEQ ID NO:28.

[0044] In some embodiments, the antibody comprises a heavy chain CDR1 comprising the amino acid sequence of SEQ ID NO: 150, a heavy chain CDR2 comprising the amino acid sequence of SEQ ID NO:23, a heavy chain CDR3 comprising the amino acid sequence of SEQ ID NO:24, a light chain CDR1 comprising the amino acid sequence of SEQ ID NO:158, a light chain CDR2 comprising the amino acid sequence of SEQ ID NO:27, and a light chain CDR3 comprising the amino acid sequence of SEQ ID NO:28.

[0045] In some embodiments, the antibody comprises a heavy chain CDR1 comprising the amino acid sequence of SEQ ID NO: 153, a heavy chain CDR2 comprising the amino acid sequence of SEQ ID NO:23, a heavy chain CDR3 comprising the amino acid sequence of SEQ ID NO:24, a light chain CDR1 comprising the amino acid sequence of SEQ ID NO:158, a light chain CDR2 comprising the amino acid sequence of SEQ ID NO:27, and a light chain CDR3 comprising the amino acid sequence of SEQ ID NO:28.

[0046] In some embodiments, the antibody comprises a heavy chain CDR1 comprising the amino acid sequence of SEQ ID NO: 154, a heavy chain CDR2 comprising the amino acid sequence of SEQ ID NO:23, a heavy chain CDR3 comprising the amino acid sequence of SEQ ID NO:24, a light chain CDR1 comprising the amino acid sequence of SEQ ID NO:158, a light chain CDR2 comprising the amino acid sequence of SEQ ID NO:27, and a light chain CDR3 comprising the amino acid sequence of SEQ ID NO:28.

[0047] In some embodiments, the antibody comprises a heavy chain CDR1 comprising the amino acid sequence of SEQ ID NO:22, a heavy chain CDR2 comprising the amino acid sequence of SEQ ID NO:23, a heavy chain CDR3 comprising the amino acid sequence of SEQ ID NO: 155, a light chain CDR1 comprising the amino acid sequence of SEQ ID NO:158, a light chain CDR2 comprising the amino acid sequence of SEQ ID NO:27, and a light chain CDR3 comprising the amino acid sequence of SEQ ID NO:28.

[0048] In some embodiments, the antibody comprises a heavy chain CDR1 comprising the amino acid sequence of SEQ ID NO: 150, a heavy chain CDR2 comprising the amino acid sequence of SEQ ID NO:23, a heavy chain CDR3 comprising the amino acid sequence of SEQ ID NO: 155, a light chain CDR1 comprising the amino acid sequence of SEQ ID NO:158, a light chain CDR2 comprising the amino acid sequence of SEQ ID NO:27, and a light chain CDR3 comprising the amino acid sequence of SEQ ID NO:28.

[0049] In some embodiments, the antibody comprises a heavy chain CDR1 comprising the amino acid sequence of SEQ ID NO: 151, a heavy chain CDR2 comprising the amino acid sequence of SEQ ID NO:23, a heavy chain CDR3 comprising the amino acid sequence of SEQ ID NO: 155, a light chain CDR1 comprising the amino acid sequence of SEQ ID NO:158, a light chain CDR2 comprising the amino acid sequence of SEQ ID NO:27, and a light chain CDR3 comprising the amino acid sequence of SEQ ID NO:28.

[0050] In some embodiments, the antibody comprises a heavy chain CDR1 comprising the amino acid sequence of SEQ ID NO: 153, a heavy chain CDR2 comprising the amino acid sequence of SEQ ID NO:23, a heavy chain CDR3 comprising the amino acid sequence of SEQ ID NO: 155, a light chain CDR1 comprising the amino acid sequence of SEQ ID NO:158, a light chain CDR2 comprising the amino acid sequence of SEQ ID NO:27, and a light chain CDR3 comprising the amino acid sequence of SEQ ID NO:28.

[0051] In some embodiments, the antibody comprises a heavy chain CDR1 comprising the amino acid sequence of SEQ ID NO: 154, a heavy chain CDR2 comprising the amino acid sequence of SEQ ID NO:23, a heavy chain CDR3 comprising the amino acid sequence of SEQ ID NO: 155, a light chain CDR1 comprising the amino acid sequence of SEQ ID NO:158, a light chain CDR2 comprising the amino acid sequence of SEQ ID NO:27, and a light chain CDR3 comprising the amino acid sequence of SEQ ID NO:28.

[0052] In some embodiments, the antibody comprises a heavy chain variable region comprising an amino acid sequence that has at least 90% sequence identity (90%, 92%, 94%, 96%, 98%, 99%, or 100% sequence identity) to any one of SEQ ID NOS: 145-148.

[0053] In some embodiments, the antibody comprises a light chain variable region comprising an amino acid sequence that has at least 90% sequence identity (90%, 92%, 94%, 96%, 98%, 99%, or 100% sequence identity) to SEQ ID NO:149.

[0054] In some embodiments, the antibody comprises a heavy chain variable region comprising an amino acid sequence that has at least 90% sequence identity (90%, 92%, 94%, 96%, 98%, 99%, or 100% sequence identity) to SEQ ID NO:145 and a light chain variable region comprising an amino acid sequence that has at least 90% sequence identity (90%, 92%, 94%, 96%, 98%, 99%, or 100% sequence identity) to SEQ ID NO: 149.

[0055] In some embodiments, the antibody comprises a heavy chain variable region comprising an amino acid sequence that has at least 90% sequence identity (90%, 92%, 94%, 96%, 98%, 99%, or 100% sequence identity) to SEQ ID NO:146 and a light chain variable region comprising an amino acid sequence that has at least 90% sequence identity (90%, 92%, 94%, 96%, 98%, 99%, or 100% sequence identity) to SEQ ID NO:149.

[0056] In some embodiments, the antibody comprises a heavy chain variable region comprising an amino acid sequence that has at least 90% sequence identity (90%, 92%, 94%, 96%, 98%, 99%, or 100% sequence identity) to SEQ ID NO:147 and a light chain variable region comprising an amino acid sequence that has at least 90% sequence identity (90%, 92%, 94%, 96%, 98%, 99%, or 100% sequence identity) to SEQ ID NO:149.

[0057] In some embodiments, the antibody comprises a heavy chain variable region comprising an amino acid sequence that has at least 90% sequence identity (90%, 92%, 94%, 96%, 98%, 99%, or 100% sequence identity) to SEQ ID NO:148 and a light chain variable region comprising an amino acid sequence that has at least 90% sequence identity (90%, 92%, 94%, 96%, 98%, 99%, or 100% sequence identity) to SEQ ID NO: 149.

[0058] In some embodiments, the antibody comprises a heavy chain variable region comprising an amino acid sequence that has at least 90% sequence identity (90%, 92%, 94%, 96%, 98%, 99%, or 100% sequence identity) to SEQ ID NO:146 and a light chain variable region comprising an amino acid sequence that has at least 90% sequence identity (90%, 92%, 94%, 96%, 98%, 99%, or 100% sequence identity) to SEQ ID NO:463.

[0059] In some embodiments, the antibody comprises a heavy chain variable region comprising an amino acid sequence that has at least 90% sequence identity (90%, 92%, 94%, 96%, 98%, 99%, or 100% sequence identity) to SEQ ID NO:146 and a light chain variable region comprising an amino acid sequence that has at least 90% sequence identity (90%, 92%, 94%, 96%, 98%, 99%, or 100% sequence identity) to SEQ ID NO:464.

[0060] In some embodiments, the antibody comprises one or more complementarity determining regions (CDRs) selected from the group consisting of: (a) a heavy chain CDR1 having at least 90% sequence identity (90%, 92%, 94%, 96%, 98%, 99%, or 100% sequence identity) to the amino acid sequence of any one of SEQ ID NOS:151, 153, 426-430, 432-437, 586, and 587 or having up to two amino acid substitutions relative to the amino acid sequence of any one of SEQ ID NOS: 151, 153, 426-430, 432-437, 586, and 587; (b) a heavy chain CDR2 having at least 90% sequence identity (90%, 92%, 94%, 96%, 98%, 99%, or 100% sequence identity) to the amino acid sequence of any one of SEQ ID NOS:23 and 588 or having up to two amino acid substitutions relative to the amino acid sequence of any one of SEQ ID NOS:23 and 588; (c) a heavy chain CDR3 having at least 90% sequence identity (90%, 92%, 94%, 96%, 98%, 99%, or 100% sequence identity) to the amino acid sequence of SEQ ID NO:24 or having up to two amino acid substitutions relative to the amino acid sequence of SEQ ID NO:24; (d) a light chain CDR1 having at least 90% sequence identity (90%, 92%, 94%, 96%, 98%, 99%, or 100% sequence identity) to the amino acid sequence of any one of SEQ ID NOS:158 and 448-458 or having up to two amino acid substitutions relative to the amino acid sequence of any one of SEQ ID NOS:158 and 448-458; (e) a light chain CDR2 having at least 90% sequence identity (90%, 92%, 94%, 96%, 98%, 99%, or 100% sequence identity) to the amino acid sequence of SEQ ID NO:27 or having up to two amino acid substitutions relative to the amino acid sequence of SEQ ID NO:27; and (f) a light chain CDR3 having at least 90% sequence identity (90%, 92%, 94%, 96%, 98%, 99%, or 100% sequence identity) to the amino acid sequence of any one of SEQ ID NOS:28 and 461 or having up to two amino acid substitutions relative to the amino acid sequence of any one of SEQ ID NOS:28 and 461.

[0061] In some embodiments, the antibody comprises one or more CDRs selected from the group consisting of: (a) a heavy chain CDR1 comprising the amino acid sequence of any one of SEQ ID NOS:151, 153, 426-430, 432-437, 586, and 587; (b) a heavy chain CDR2 comprising the amino acid sequence of any one of SEQ ID NOS:23 and 588; (c) a heavy chain CDR3 comprising the amino acid sequence of SEQ ID NO:24; (d) a light chain CDR1 comprising the amino acid sequence of any one of SEQ ID NOS:158 and 448-458; (e) a light chain CDR2 comprising the amino acid sequence of SEQ ID NO:27; and (f) a light chain CDR3 comprising the amino acid sequence of any one of SEQ ID NOS:28 and 461.

[0062] In some embodiments, the antibody comprises (a) a heavy chain CDR1 comprising the amino acid sequence of any one of SEQ ID NOS:151, 153, 426-430, 432-437, 586, and 587; (b) a heavy chain CDR2 comprising the amino acid sequence of any one of SEQ ID NOS:23 and 588; and (c) a heavy chain CDR3 comprising the amino acid sequence of SEQ ID NO:24.

[0063] In some embodiments, the antibody comprises (a) a light chain CDR1 comprising the amino acid sequence of any one of SEQ ID NOS:158 and 448-458; (b) a light chain CDR2 comprising the amino acid sequence of SEQ ID NO:27; and (c) a light chain CDR3 comprising the amino acid sequence of any one of SEQ ID NOS:28 and 461.

[0064] In some embodiments, the antibody comprises (a) a heavy chain CDR1 comprising the amino acid sequence of any one of SEQ ID NOS:151, 153, 426-430, 432-437, 586, and 587; (b) a heavy chain CDR2 comprising the amino acid sequence of any one of SEQ ID NOS:23 and 588; (c) a heavy chain CDR3 comprising the amino acid sequence of SEQ ID NO:24; (d) a light chain CDR1 comprising the amino acid sequence of any one of SEQ ID NOS:158 and 448-458; (e) a light chain CDR2 comprising the amino acid sequence of SEQ ID NO:27; and (f) a light chain CDR3 comprising the amino acid sequence of any one of SEQ ID NOS:28 and 461.

[0065] In some embodiments, an antibody (or antigen-binding portion thereof) that specifically binds to a human Tau protein recognizes an epitope within residues 251-270 and/or residues 346-360 of SEQ ID NO: 1. In some embodiments, the antibody recognizes an epitope within residues 251-270 of SEQ ID NO:1. In some embodiments, the antibody recognizes an epitope within residues 346-360 of SEQ ID NO: 1. In some embodiments, the antibody recognizes both an epitope within residues 251-270 of SEQ ID NO:1 and recognizes an epitope within residues 346-360 of SEQ ID NO: 1. In some embodiments, the antibody recognizes an epitope within residues 256-270 of SEQ ID NO: 1. In some embodiments, the antibody recognizes an epitope comprising the sequence SKIGS within residues 251-270 and/or residues 346-360 of SEQ ID NO: 1.

[0066] In some embodiments, the antibody comprises one or more (e.g., one, two, three, four, five, or all six) CDRs selected from the group consisting of:
[0067] (a) a heavy chain CDR1 having at least 90% sequence identity (90%, 92%, 94%, 96%, 98%, 99%, or 100% sequence identity) to the amino acid sequence of any one of SEQ ID NOS:9, 17, and 47 or having up to two amino acid substitutions relative to the amino acid sequence of any one of SEQ ID NOS:9, 17, and 47;
[0068] (b) a heavy chain CDR2 having at least 90% sequence identity (90%, 92%, 94%, 96%, 98%, 99%, or 100% sequence identity) to the amino acid sequence of SEQ ID NO: 10 or having up to two amino acid substitutions relative to the amino acid sequence of SEQ ID NO:10;
[0069] (c) a heavy chain CDR3 having at least 90% sequence identity (90%, 92%, 94%, 96%, 98%, 99%, or 100% sequence identity) to the amino acid sequence of any one of SEQ ID NOS:11, 18, 30, 33, and 48 or having up to two amino acid substitutions relative to the amino acid sequence of any one of SEQ ID NOS:11, 18, 30, 33, and 48;
[0070] (d) a light chain CDR1 having at least 90% sequence identity (90%, 92%, 94%, 96%, 98%, 99%, or 100% sequence identity) to the amino acid sequence of SEQ ID NO:13 or having up to two amino acid substitutions relative to the amino acid sequence of SEQ ID NO: 13;
[0071] (e) a light chain CDR2 having at least 90% sequence identity (90%, 92%, 94%, 96%, 98%, 99%, or 100% sequence identity) to the amino acid sequence of SEQ ID NO:14 or having up to two amino acid substitutions relative to the amino acid sequence of SEQ ID NO: 14; and
[0072] (f) a light chain CDR3 having at least 90% sequence identity (90%, 92%, 94%, 96%, 98%, 99%, or 100% sequence identity) to the amino acid sequence of any one of SEQ ID NOS:15, 20, and 49 or having up to two amino acid substitutions relative to the amino acid sequence of any one of SEQ ID NOS:15, 20, and 49.

[0073] In some embodiments, the antibody comprises one or more (e.g., one, two, three, four, five, or all six) CDRs selected from the group consisting of:
[0074] (a) a heavy chain CDR1 comprising the amino acid sequence of any one of SEQ ID NOS:9, 17, and 47;
[0075] (b) a heavy chain CDR2 comprising the amino acid sequence of SEQ ID NO:10;
[0076] (c) a heavy chain CDR3 comprising the amino acid sequence of any one of SEQ ID NOS:11, 18, 30, 33, and 48;
[0077] (d) a light chain CDR1 comprising the amino acid sequence of SEQ ID NO: 13;
[0078] (e) a light chain CDR2 comprising the amino acid sequence of SEQ ID NO: 14; and
[0079] (f) a light chain CDR3 comprising the amino acid sequence of any one of SEQ ID NOS:15, 20, and 49.

[0080] In some embodiments, the antibody comprises a heavy chain CDR1 comprising the amino acid sequence of SEQ ID NO:9, a heavy chain CDR2 comprising the amino acid sequence of SEQ ID NO:10, and a heavy chain CDR3 comprising the amino acid sequence of SEQ ID NO: 11. In some embodiments, the antibody comprises a light chain CDR1 comprising the amino acid sequence of SEQ ID NO: 13, a light chain CDR2 comprising the amino acid sequence of SEQ ID NO:14, and a light chain CDR3 comprising the amino acid sequence of SEQ ID NO:15. In some embodiments, the antibody comprises a heavy chain CDR1 comprising the amino acid sequence of SEQ ID NO:9, a heavy chain CDR2 comprising the amino acid sequence of SEQ ID NO: 10, a heavy chain CDR3 comprising the amino acid sequence of SEQ ID NO: 11, a light chain CDR1 comprising the amino acid sequence of SEQ ID NO: 13, a light chain CDR2 comprising the amino acid sequence of SEQ ID NO: 14, and a light chain CDR3 comprising the amino acid sequence of SEQ ID NO: 15.

[0081] In some embodiments, the antibody comprises a heavy chain CDR1 comprising the amino acid sequence of SEQ ID NO: 17, a heavy chain CDR2 comprising the amino acid sequence of SEQ ID NO:10, and a heavy chain CDR3 comprising the amino acid sequence of SEQ ID NO:18. In some embodiments, the antibody comprises a light chain CDR1 comprising the amino acid sequence of SEQ ID NO: 13, a light chain CDR2 comprising the amino acid sequence of SEQ ID NO: 14, and a light chain CDR3 comprising the amino acid sequence of SEQ ID NO:20. In some embodiments, the antibody comprises a heavy chain CDR1 comprising the amino acid sequence of SEQ ID NO: 17, a heavy chain CDR2 comprising the amino acid sequence of SEQ ID NO:10, a heavy chain CDR3 comprising the amino acid sequence of SEQ ID NO:18, a light chain CDR1 comprising the amino acid sequence of SEQ ID NO: 13, a light chain CDR2 comprising the amino acid sequence of SEQ ID NO: 14, and a light chain CDR3 comprising the amino acid sequence of SEQ ID NO:20.

[0082] In some embodiments, the antibody comprises a heavy chain CDR1 comprising the amino acid sequence of SEQ ID NO:9, a heavy chain CDR2 comprising the amino acid sequence of SEQ ID NO:10, and a heavy chain CDR3 comprising the amino acid sequence of SEQ ID NO:30. In some embodiments, the antibody comprises a light chain CDR1 comprising the amino acid sequence of SEQ ID NO: 13, a light chain CDR2 comprising the amino acid sequence of SEQ ID NO: 14, and a light chain CDR3 comprising the amino acid sequence of SEQ ID NO:20. In some embodiments, the antibody comprises a heavy chain CDR1 comprising the amino acid sequence of SEQ ID NO:9, a heavy chain CDR2 comprising the amino acid sequence of SEQ ID NO: 10, a heavy chain CDR3 comprising the amino acid sequence of SEQ ID NO:30, a light chain CDR1 comprising the amino acid sequence of SEQ ID NO: 13, a light chain CDR2 comprising the amino acid sequence of SEQ ID NO: 14, and a light chain CDR3 comprising the amino acid sequence of SEQ ID NO:20.

[0083] In some embodiments, the antibody comprises a heavy chain CDR1 comprising the amino acid sequence of SEQ ID NO:9, a heavy chain CDR2 comprising the amino acid sequence of SEQ ID NO:10, and a heavy chain CDR3 comprising the amino acid sequence of SEQ ID NO:33. In some embodiments, the antibody comprises a light chain CDR1 comprising the amino acid sequence of SEQ ID NO: 13, a light chain CDR2 comprising the amino acid sequence of SEQ ID NO: 14, and a light chain CDR3 comprising the amino acid sequence of SEQ ID NO:20. In some embodiments, the antibody comprises a heavy chain CDR1 comprising the amino acid sequence of SEQ ID NO:9, a heavy chain CDR2 comprising the amino acid sequence of SEQ ID NO: 10, a heavy chain CDR3 comprising the amino acid sequence of SEQ ID NO:33, a light chain CDR1 comprising the amino acid sequence of SEQ ID NO: 13, a light chain CDR2 comprising the amino acid sequence of SEQ ID NO: 14, and a light chain CDR3 comprising the amino acid sequence of SEQ ID NO:20.

[0084] In some embodiments, the antibody comprises a heavy chain variable region comprising an amino acid sequence that has at least 90% sequence identity (90%, 92%, 94%, 96%, 98%, 99%, or 100% sequence identity) to any one of SEQ ID NOS:8, 16, 29, and 32. In some embodiments, the antibody comprises a light chain variable region comprising an amino acid sequence that has at least 90% sequence identity (90%, 92%, 94%, 96%, 98%, 99%, or 100% sequence identity) to any one of SEQ ID NOS:12, 19, 31, and 34. In some embodiments, the antibody comprises a heavy chain variable region comprising an amino acid sequence that has at least 90% sequence identity (90%, 92%, 94%, 96%, 98%, 99%, or 100% sequence identity) to any one of SEQ ID NOS:8, 16, 29, and 32, and a light chain variable region comprising an amino acid sequence that has at least 90% sequence identity (90%, 92%, 94%, 96%, 98%, 99%, or 100% sequence identity) to any one of SEQ ID NOS: 12, 19, 31, and 34. In some embodiments, the antibody comprises an amino acid sequence that has at least 90% sequence identity (90%, 92%, 94%, 96%, 98%, 99%, or 100% sequence identity) to SEQ ID NO:8 and a light chain variable region comprising an amino acid sequence that has at least 90% sequence identity (90%, 92%, 94%, 96%, 98%, 99%, or 100% sequence identity) to SEQ ID NO: 12. In some embodiments, the antibody comprises a heavy chain variable region comprising an amino acid sequence that has at least 90% sequence identity (90%, 92%, 94%, 96%, 98%, 99%, or 100% sequence identity) to SEQ ID NO: 16 and a light chain variable region comprising an amino acid sequence that has at least 90% sequence identity (90%, 92%, 94%, 96%, 98%, 99%, or 100% sequence identity) to SEQ ID NO:19. In some embodiments, the antibody comprises a heavy chain variable region comprising an amino acid sequence that has at least 90% sequence identity (90%, 92%, 94%, 96%, 98%, 99%, or 100% sequence identity) to SEQ ID NO:29 and a light chain variable region comprising an amino acid sequence that has at least 90% sequence identity (90%, 92%, 94%, 96%, 98%, 99%, or 100% sequence identity) to SEQ ID NO:31. In some embodiments, the antibody comprises a heavy chain variable region comprising an amino acid sequence that has at least 90% sequence identity (90%, 92%, 94%, 96%, 98%, 99%, or 100% sequence identity) to SEQ ID NO:32 and a light chain variable region comprising an amino acid sequence that has at least 90% sequence identity (90%, 92%, 94%, 96%, 98%, 99%, or 100% sequence identity) to SEQ ID NO:34.

[0085] In another aspect, an isolated antibody or antigen-binding portion thereof that specifically binds to a human Tau protein and recognizes an epitope within residues 186-205 of SEQ ID NO:1 is provided. In some embodiments, the antibody or antigen-binding portion thereof recognizes an epitope within residues 186-200 or residues 191-205 of SEQ ID NO:1.

[0086] In some embodiments, the antibody comprises one or more complementarity determining regions (CDRs) selected from the group consisting of:
[0087] (a) a heavy chain CDR1 having at least 90% sequence identity (90%, 92%, 94%, 96%, 98%, 99%, or 100% sequence identity) to the amino acid sequence of SEQ ID NO: 168 or having up to two amino acid substitutions relative to the amino acid sequence of SEQ ID NO:168;
[0088] (b) a heavy chain CDR2 having at least 90% sequence identity (90%, 92%, 94%, 96%, 98%, 99%, or 100% sequence identity) to the amino acid sequence of SEQ ID NO: 169 or having up to two amino acid substitutions relative to the amino acid sequence of SEQ ID NO:169;
[0089] (c) a heavy chain CDR3 having at least 90% sequence identity (90%, 92%, 94%, 96%, 98%, 99%, or 100% sequence identity) to the amino acid sequence of SEQ ID NO: 170 or having up to two amino acid substitutions relative to the amino acid sequence of SEQ ID NO:170;
[0090] (d) a light chain CDR1 having at least 90% sequence identity (90%, 92%, 94%, 96%, 98%, 99%, or 100% sequence identity) to the amino acid sequence of SEQ ID NO:172 or having up to two amino acid substitutions relative to the amino acid sequence of SEQ ID NO: 172;
[0091] (e) a light chain CDR2 having at least 90% sequence identity (90%, 92%, 94%, 96%, 98%, 99%, or 100% sequence identity) to the amino acid sequence of SEQ ID NO:173 or having up to two amino acid substitutions relative to the amino acid sequence of any one of SEQ ID NO:173; and
[0092] (f) a light chain CDR3 having at least 90% sequence identity (90%, 92%, 94%, 96%, 98%, 99%, or 100% sequence identity) to the amino acid sequence of SEQ ID NO:174 or having up to two amino acid substitutions relative to the amino acid sequence of any one of SEQ ID NO: 174.

[0093] In some embodiments, the antibody comprises one or more CDRs selected from the group consisting of: a heavy chain CDR1 comprising the amino acid sequence of SEQ ID NO: 168; a heavy chain CDR2 comprising the amino acid sequence of SEQ ID NO: 169; a heavy chain CDR3 comprising the amino acid sequence of SEQ ID NO:170; a light chain CDR1 comprising the amino acid sequence of SEQ ID NO: 172; a light chain CDR2 comprising the amino acid sequence of SEQ ID NO: 173; and a light chain CDR3 comprising the amino acid sequence of SEQ ID NO: 174. In some embodiments, the antibody comprises a heavy chain CDR1 comprising the amino acid sequence of SEQ ID NO: 168; a heavy chain CDR2 comprising the amino acid sequence of SEQ ID NO: 169; and a heavy chain CDR3 comprising the amino acid sequence of SEQ ID NO:170. In some embodiments, the antibody comprises a light chain CDR1 comprising the amino acid sequence of SEQ ID NO: 172; a light chain CDR2 comprising the amino acid sequence of SEQ ID NO: 173; and a light chain CDR3 comprising the amino acid sequence of SEQ ID NO: 174.

[0094] In some embodiments, the antibody comprises a heavy chain CDR1 comprising the amino acid sequence of SEQ ID NO: 168, a heavy chain CDR2 comprising the amino acid sequence of SEQ ID NO: 169, a heavy chain CDR3 comprising the amino acid sequence of SEQ ID NO: 170, a light chain CDR1 comprising the amino acid sequence of SEQ ID NO: 172, a light chain CDR2 comprising the amino acid sequence of SEQ ID NO: 173, and a light chain CDR3 comprising the amino acid sequence of SEQ ID NO: 174.

[0095] In some embodiments, the antibody comprises a heavy chain variable region comprising an amino acid sequence that has at least 90% sequence identity (90%, 92%, 94%, 96%, 98%, 99%, or 100% sequence identity) to SEQ ID NO: 167. In some embodiments, the antibody comprises a light chain variable region comprising an amino acid sequence that has at least 90% sequence identity (90%, 92%, 94%, 96%, 98%, 99%, or 100% sequence identity) to SEQ ID NO:171. In some embodiments, the antibody comprises a heavy chain variable region comprising an amino acid sequence that has at least 90% sequence identity (90%, 92%, 94%, 96%, 98%, 99%, or 100% sequence identity) to SEQ ID NO: 167 and a light chain variable region comprising an amino acid sequence that has at least 90% sequence identity (90%, 92%, 94%, 96%, 98%, 99%, or 100% sequence identity) to SEQ ID NO: 171.

[0096] In another aspect, an isolated antibody or antigen-binding portion thereof that specifically binds to a human Tau protein and recognizes an epitope that is the same or substantially the same as the epitope recognized by antibody clone 19F7.C9 or 24D2.B2 is provided. In some embodiments, the epitope recognized by antibody clone 19F7.C9 or 24D2.B2 comprises one or more residues within residues 50-421 of SEQ ID NO:1. In some embodiments, the epitope recognized by antibody clone 19F7.C9 or 24D2.B2 is within residues 50-421 of SEQ ID NO: 1.

[0097] In some embodiments, in any of the anti-Tau antibodies described herein, the antibody comprises a first Fc polypeptide and optionally a second Fc polypeptide. In some embodiments, the antibody comprises a first Fc polypeptide and a second Fc polypeptide. In some embodiments, the first Fc polypeptide is a modified Fc polypeptide and/or the second Fc polypeptide is a modified Fc polypeptide.

[0098] In some embodiments, in any of the anti-Tau antibodies described herein, the antibody comprises:
[0099] (a) a first antigen-binding portion comprising a first variable region that specifically binds to the human Tau protein, wherein the first antigen-binding portion comprises (i) a first heavy chain comprising a first Fc polypeptide and (ii) a first light chain; and
[0100] (b) a second antigen-binding portion comprising a second variable region that specifically binds to the human Tau protein, wherein the second antigen-binding portion comprises (i) a second heavy chain comprising a second Fc polypeptide and (ii) a second light chain;

[0101] wherein the first Fc polypeptide and the second Fc polypeptide form an Fc dimer.

[0102] In some embodiments, the first Fc polypeptide is a modified Fc polypeptide and/or the second Fc polypeptide is a modified Fc polypeptide.

[0103] In some embodiments, the first and second variable regions recognize the same epitope in the human Tau protein. In other embodiments, the first and second variable regions recognize different epitopes in the human Tau protein.

[0104] In some embodiments, the first Fc polypeptide and the second Fc polypeptide each contain modifications that promote heterodimerization. In some embodiments, one of the Fc polypeptides has a T366W substitution and the other Fc polypeptide has T366S, L368A, and Y407V substitutions, according to EU numbering.

[0105] In some embodiments, the first Fc polypeptide and/or the second Fc polypeptide comprises a native FcRn binding site. In some embodiments, the first Fc polypeptide and/or the second Fc polypeptide comprises a modification that alters FcRn binding.

[0106] In some embodiments, the first Fc polypeptide and the second Fc polypeptide do not have effector function. In some embodiments, the first Fc polypeptide and/or the second Fc polypeptide includes a modification that reduces effector function. In some embodiments, the modifications that reduce effector function comprise the substitutions of Ala at position 234 and Ala at position 235, according to EU numbering.

[0107] In some embodiments, the first Fc polypeptide and/or the second Fc polypeptide comprises amino acid changes relative to the native Fc sequence that extend serum half-life. In some embodiments, the amino acid changes comprise substitutions of Tyr at position 252, Thr at position 254, and Glu at position 256, according to EU numbering. Alternatively, in other embodiments, the amino acid changes comprise substitutions of Leu at position 428 and Ser at position 434, according to EU numbering. Alternatively, in further embodiments, the amino acid changes comprise a substitution of Ser or Ala at position 434, according to EU numbering.

[0108] In some embodiments, the first Fc polypeptide and/or the second Fc polypeptide specifically binds to a transferrin receptor. In some embodiments, the first Fc polypeptide and/or the second Fc polypeptide comprises at least two substitutions at positions selected from the group consisting of 384, 386, 387, 388, 389, 390, 413, 416, and 421, according to EU numbering. In some embodiments, the first Fc polypeptide and/or the second Fc polypeptide comprises substitutions at at least three, four, five, six, seven, eight, or nine of the positions.

[0109] In some embodiments, the first Fc polypeptide and/or the second Fc polypeptide further comprises one, two, three, or four substitutions at positions comprising 380, 391, 392, and 415, according to EU numbering. In some embodiments, the first Fc polypeptide and/or the second Fc polypeptide further comprises one, two, or three substitutions at positions comprising 414, 424, and 426, according to EU numbering.

[0110] In some embodiments, the first Fc polypeptide and/or the second Fc polypeptide comprises Trp at position 388. In some embodiments, the first Fc polypeptide and/or the second Fc polypeptide comprises an aromatic amino acid at position 421. In some embodiments, the aromatic amino acid at position 421 is Trp or Phe.

[0111] In some embodiments, the first Fc polypeptide and/or the second Fc polypeptide comprises at least one position selected from the following: position 380 is Trp, Leu, or Glu; position 384 is Tyr or Phe; position 386 is Thr; position 387 is Glu; position 388 is Trp; position 389 is Ser, Ala, Val, or Asn; position 390 is Ser or Asn; position 413 is Thr or Ser; position 415 is Glu or Ser; position 416 is Glu; and position 421 is Phe.

[0112] In some embodiments, the first Fc polypeptide and/or the second Fc polypeptide comprises 2, 3, 4, 5, 6, 7, 8, 9, 10, or 11 positions selected from the following: position 380 is Trp, Leu, or Glu; position 384 is Tyr or Phe; position 386 is Thr; position 387 is Glu; position 388 is Trp; position 389 is Ser, Ala, Val, or Asn; position 390 is Ser or Asn; position 413 is Thr or Ser; position 415 is Glu or Ser; position 416 is Glu; and position 421 is Phe.

[0113] In some embodiments, the first Fc polypeptide and/or the second Fc polypeptide comprises 11 positions as follows: position 380 is Trp, Leu, or Glu; position 384 is Tyr or Phe; position 386 is Thr; position 387 is Glu; position 388 is Trp; position 389 is Ser, Ala, Val, or Asn; position 390 is Ser or Asn; position 413 is Thr or Ser; position 415 is Glu or Ser; position 416 is Glu; and position 421 is Phe.

[0114] In some embodiments, the first Fc polypeptide and/or the second Fc polypeptide has a CH3 domain with at least 85% identity, at least 90% identity, or at least 95% identity to amino acids 111-217 of any one of SEQ ID NOS:214-218, 238, 240-270, and 469-475. In some embodiments, the residues at at least 5, 6, 7, 8, 9, 10, 11, 12, 13, 14, 15, or 16 of the positions corresponding to EU index positions 380, 384, 386, 387, 388, 389, 390, 391, 392, 413, 414, 415, 416, 421, 424 and 426 of any one of SEQ ID NOS:214-218, 238, 240-270, and 469-475 are not deleted or substituted.

[0115] In some embodiments, the antibody comprises a first Fc polypeptide having the sequence of any one of SEQ ID NOS:283-286 and 626-628. In some embodiments, the antibody comprises a second Fc polypeptide having the sequence of any one of SEQ ID NOS:279-282 and 629-631.

[0116] In some embodiments, in any of the anti-Tau antibodies described herein, the antibody comprises a first Fc polypeptide having the sequence of SEQ ID NO:271 and a second Fc polypeptide having the sequence of SEQ ID NO:279. In some embodiments, the anti-Tau antibody comprises a first Fc polypeptide having the sequence of SEQ ID NO:272 and a second Fc polypeptide having the sequence of SEQ ID NO:280. In some embodiments, the anti-Tau antibody comprises a first Fc polypeptide having the sequence of SEQ ID NO:273 and a second Fc polypeptide having the sequence of SEQ ID NO:281. In some embodiments, the anti-Tau antibody comprises a first Fc polypeptide having the sequence of SEQ ID NO:274 and a second Fc polypeptide having the sequence of SEQ ID NO:282.

[0117] In some embodiments, in any of the anti-Tau antibodies described herein, the antibody comprises a first Fc polypeptide having the sequence of SEQ ID NO:275 and a second Fc polypeptide having the sequence of SEQ ID NO:283. In some embodiments, the anti-Tau antibody comprises a first Fc polypeptide having the sequence of SEQ ID NO:276 and a second Fc polypeptide having the sequence of SEQ ID NO:284. In some embodiments, the anti-Tau antibody comprises a first Fc polypeptide having the sequence of SEQ ID NO:277 and a second Fc polypeptide having the sequence of SEQ ID NO:285. In some embodiments, the anti-Tau antibody comprises a first Fc polypeptide having the sequence of SEQ ID NO:278 and a second Fc polypeptide having the sequence of SEQ ID NO:286.

[0118] In some embodiments, in any of the anti-Tau antibodies described herein, the antibody comprises a first Fc polypeptide having the sequence of SEQ ID NO:271 and a second Fc polypeptide having the sequence of SEQ ID NO:275. In some embodiments, the anti-Tau antibody comprises a first Fc polypeptide having the sequence of SEQ ID NO:272 and a second Fc polypeptide having the sequence of SEQ ID NO:276. In some embodiments, the anti-Tau antibody comprises a first Fc polypeptide having the sequence of SEQ ID NO:273 and a second Fc polypeptide having the sequence of SEQ ID NO:277. In some embodiments, the anti-Tau antibody comprises a first Fc polypeptide having the sequence of SEQ ID NO:274 and a second Fc polypeptide having the sequence of SEQ ID NO:278.

[0119] In some embodiments, the first Fc polypeptide and/or the second Fc polypeptide of the antibody binds to the apical domain of the transferrin receptor. In some embodiments, the binding of the antibody or antigen-binding portion thereof to the transferrin receptor does not substantially inhibit binding of transferrin to the transferrin receptor.

[0120] In some embodiments, the first Fc polypeptide and/or the second Fc polypeptide has at least 75%, or at least 80%, 90%, 92%, or 95%, amino acid sequence identity to the corresponding wild-type Fc polypeptide (e.g., a wild-type Fc polypeptide that is a human IgG1, IgG2, IgG3, or IgG4 Fc polypeptide).

[0121] In some embodiments, uptake of the antibody or antigen-binding portion thereof into the brain is greater than the uptake of the antibody or antigen-binding portion thereof without the modifications in the first Fc polypeptide and/or the second Fc polypeptide that result in transferrin receptor binding. In some embodiments, uptake of the antibody or antigen-binding portion thereof into the brain is at least 2, 3, 4, 5, 6, 7, 8, 9, 10, 15, 20, 25, 30, 35, 40, 45, 50, 55, 60, 65, 70, 75, 80, 85, 90, 95, or 100-fold greater as compared to the uptake of the antibody or antigen-binding portion thereof without the modifications in the first Fc polypeptide and/or the second Fc polypeptide that result in transferrin receptor binding.

[0122] In other embodiments, one of the Fc polypeptides of the anti-Tau antibody is not modified to bind to a blood-brain barrier receptor and the other Fc polypeptide of the anti-Tau antibody is modified to specifically bind to a transferrin receptor.

[0123] In another aspect, the disclosure features an isolated antibody or antigen-binding portion thereof, comprising one or more CDRs selected from the group consisting of: (a) a heavy chain CDR1 comprising the amino acid sequence of SEQ ID NO:586; (b) a heavy chain CDR2 comprising the amino acid sequence of SEQ ID NO:588; (c) a heavy chain CDR3 comprising the amino acid sequence of SEQ ID NO:24; (d) a light chain CDR1 comprising the amino acid sequence of SEQ ID NO: 158; (e) a light chain CDR2 comprising the amino acid sequence of SEQ ID NO:27; and (f) a light chain CDR3 comprising the amino acid sequence of SEQ ID NO:28. In some embodiments, the isolated antibody comprises (a) a heavy chain CDR1 comprising the amino acid sequence of SEQ ID NO:586; (b) a heavy chain CDR2 comprising the amino acid sequence of SEQ ID NO:588; (c) a heavy chain CDR3 comprising the amino acid sequence of SEQ ID NO:24; (d) a light chain CDR1 comprising the amino acid sequence of SEQ ID NO: 158; (e) a light chain CDR2 comprising the amino acid sequence of SEQ ID NO:27; and (f) a light chain CDR3 comprising the amino acid sequence of SEQ ID NO:28. In some embodiments, the isolated antibody comprises a heavy chain variable region comprising an amino acid sequence that has at least 90% sequence identity (90%, 92%, 94%, 96%, 98%, 99%, or 100% sequence identity) to SEQ ID NO:602 and a light chain variable region comprising an amino acid sequence that has at least 90% sequence identity (90%, 92%, 94%, 96%, 98%, 99%, or 100% sequence identity) to SEQ ID NO:604. In some embodiments, the isolated antibody comprises a heavy chain variable region comprising the amino acid sequence of SEQ ID NO:602 and a light chain variable region comprising the amino acid sequence of SEQ ID NO:604.

[0124] In another aspect, the disclosure features an isolated antibody or antigen-binding portion thereof, comprising one or more CDRs selected from the group consisting of: (a) a heavy chain CDR1 comprising the amino acid sequence of SEQ ID NO:586; (b) a heavy chain CDR2 comprising the amino acid sequence of SEQ ID NO:588; (c) a heavy chain CDR3 comprising the amino acid sequence of SEQ ID NO:24; (d) a light chain CDR1 comprising the amino acid sequence of SEQ ID NO: 158; (e) a light chain CDR2 comprising the amino acid sequence of SEQ ID NO:27; and (f) a light chain CDR3 comprising the amino acid sequence of SEQ ID NO:461. In some embodiments, the isolated antibody comprises (a) a heavy chain CDR1 comprising the amino acid sequence of SEQ ID NO:586; (b) a heavy chain CDR2 comprising the amino acid sequence of SEQ ID NO:588; (c) a heavy chain CDR3 comprising the amino acid sequence of SEQ ID NO:24; (d) a light chain CDR1 comprising the amino acid sequence of SEQ ID NO:158; (e) a light chain CDR2 comprising the amino acid sequence of SEQ ID NO:27; and (f) a light chain CDR3 comprising the amino acid sequence of SEQ ID NO:461. In some embodiments, the isolated antibody comprises a heavy chain variable region comprising an amino acid sequence that has at least 90% sequence identity (90%, 92%, 94%, 96%, 98%, 99%, or 100% sequence identity) to SEQ ID NO:602 and a light chain variable region comprising an amino acid sequence that has at least 90% sequence identity (90%, 92%, 94%, 96%, 98%, 99%, or 100% sequence identity) to SEQ ID NO:616. In some embodiments, the isolated antibody comprises a heavy chain variable region comprising the sequence of SEQ ID NO:602 and a light chain variable region comprising the sequence of SEQ ID NO:616.

[0125] In another aspect, the disclosure features an isolated antibody or antigen-binding portion thereof, comprising one or more CDRs selected from the group consisting of: (a) a heavy chain CDR1 comprising the amino acid sequence of SEQ ID NO:586; (b) a heavy chain CDR2 comprising the amino acid sequence of SEQ ID NO:588; (c) a heavy chain CDR3 comprising the amino acid sequence of SEQ ID NO:24; (d) a light chain CDR1 comprising the amino acid sequence of SEQ ID NO:450; (e) a light chain CDR2 comprising the amino acid sequence of SEQ ID NO:27; and (f) a light chain CDR3 comprising the amino acid sequence of SEQ ID NO:461. In some embodiments, the isolated antibody comprises (a) a heavy chain CDR1 comprising the amino acid sequence of SEQ ID NO:586; (b) a heavy chain CDR2 comprising the amino acid sequence of SEQ ID NO:588; (c) a heavy chain CDR3 comprising the amino acid sequence of SEQ ID NO:24; (d) a light chain CDR1 comprising the amino acid sequence of SEQ ID NO:450; (e) a light chain CDR2 comprising the amino acid sequence of SEQ ID NO:27; and (f) a light chain CDR3 comprising the amino acid sequence of SEQ ID NO:461. In some embodiments, the isolated antibody comprises a heavy chain variable region comprising an amino acid sequence that has at least 90% sequence identity (90%, 92%, 94%, 96%, 98%, 99%, or 100% sequence identity) to SEQ ID NO:602 and a light chain variable region comprising an amino acid sequence that has at least 90% sequence identity (90%, 92%, 94%, 96%, 98%, 99%, or 100% sequence identity) to SEQ ID NO:463. In some embodiments, the isolated antibody comprises a heavy chain variable region comprising the sequence of SEQ ID NO:602 and a light chain variable region comprising the sequence of SEQ ID NO:463.

[0126] In another aspect, the disclosure features an isolated antibody or antigen-binding portion thereof, comprising one or more CDRs selected from the group consisting of: (a) a heavy chain CDR1 comprising the amino acid sequence of SEQ ID NO:587; (b) a heavy chain CDR2 comprising the amino acid sequence of SEQ ID NO:588; (c) a heavy chain CDR3 comprising the amino acid sequence of SEQ ID NO:24; (d) a light chain CDR1 comprising the amino acid sequence of SEQ ID NO: 158; (e) a light chain CDR2 comprising the amino acid sequence of SEQ ID NO:27; and (f) a light chain CDR3 comprising the amino acid sequence of SEQ ID NO:28. In some embodiments, the isolated antibody comprises (a) a heavy chain CDR1 comprising the amino acid sequence of SEQ ID NO:587; (b) a heavy chain CDR2 comprising the amino acid sequence of SEQ ID NO:588; (c) a heavy chain CDR3 comprising the amino acid sequence of SEQ ID NO:24; (d) a light chain CDR1 comprising the amino acid sequence of SEQ ID NO: 158; (e) a light chain CDR2 comprising the amino acid sequence of SEQ ID NO:27; and (f) a light chain CDR3 comprising the amino acid sequence of SEQ ID NO:28. In some embodiments, the isolated antibody comprises a heavy chain variable region comprising an amino acid sequence that has at least 90% sequence identity (90%, 92%, 94%, 96%, 98%, 99%, or 100% sequence identity) to SEQ ID NO:603 and a light chain variable region comprising an amino acid sequence that has at least 90% sequence identity (90%, 92%, 94%, 96%, 98%, 99%, or 100% sequence identity) to SEQ ID NO:604. In some embodiments, the isolated antibody comprises a heavy chain variable region comprising the sequence of SEQ ID NO:603 and a light chain variable region comprising the sequence of SEQ ID NO:604.

[0127] In another aspect, the disclosure features an isolated antibody or antigen-binding portion thereof, comprising one or more CDRs selected from the group consisting of: (a) a heavy chain CDR1 comprising the amino acid sequence of SEQ ID NO:587; (b) a heavy chain CDR2 comprising the amino acid sequence of SEQ ID NO:588; (c) a heavy chain CDR3 comprising the amino acid sequence of SEQ ID NO:24; (d) a light chain CDR1 comprising the amino acid sequence of SEQ ID NO: 158; (e) a light chain CDR2 comprising the amino acid sequence of SEQ ID NO:27; and (f) a light chain CDR3 comprising the amino acid sequence of SEQ ID NO:461. In some embodiments, the isolated antibody comprises (a) a heavy chain CDR1 comprising the amino acid sequence of SEQ ID NO:587; (b) a heavy chain CDR2 comprising the amino acid sequence of SEQ ID NO:588; (c) a heavy chain CDR3 comprising the amino acid sequence of SEQ ID NO:24; (d) a light chain CDR1 comprising the amino acid sequence of SEQ ID NO:158; (e) a light chain CDR2 comprising the amino acid sequence of SEQ ID NO:27; and (f) a light chain CDR3 comprising the amino acid sequence of SEQ ID NO:461. In some embodiments, the isolated antibody comprises a heavy chain variable region comprising an amino acid sequence that has at least 90% sequence identity (90%, 92%, 94%, 96%, 98%, 99%, or 100% sequence identity) to SEQ ID NO:603 and a light chain variable region comprising an amino acid sequence that has at least 90% sequence identity (90%, 92%, 94%, 96%, 98%, 99%, or 100% sequence identity) to SEQ ID NO:616. In some embodiments, the isolated antibody comprises a heavy chain variable region comprising the sequence of SEQ ID NO:603 and a light chain variable region comprising the sequence of SEQ ID NO:616.

[0128] In another aspect, the disclosure features an isolated antibody or antigen-binding portion thereof, comprising one or more CDRs selected from the group consisting of: (a) a heavy chain CDR1 comprising the amino acid sequence of SEQ ID NO:587; (b) a heavy chain CDR2 comprising the amino acid sequence of SEQ ID NO:588; (c) a heavy chain CDR3 comprising the amino acid sequence of SEQ ID NO:24; (d) a light chain CDR1 comprising the amino acid sequence of SEQ ID NO:450; (e) a light chain CDR2 comprising the amino acid sequence of SEQ ID NO:27; and (f) a light chain CDR3 comprising the amino acid sequence of SEQ ID NO:461. In some embodiments, the isolated antibody comprises (a) a heavy chain CDR1 comprising the amino acid sequence of SEQ ID NO:587; (b) a heavy chain CDR2 comprising the amino acid sequence of SEQ ID NO:588; (c) a heavy chain CDR3 comprising the amino acid sequence of SEQ ID NO:24; (d) a light chain CDR1 comprising the amino acid sequence of SEQ ID NO:450; (e) a light chain CDR2 comprising the amino acid sequence of SEQ ID NO:27; and (f) a light chain CDR3 comprising the amino acid sequence of SEQ ID NO:461. In some embodiments, the isolated antibody comprises a heavy chain variable region comprising an amino acid sequence that has at least 90% sequence identity (90%, 92%, 94%, 96%, 98%, 99%, or 100% sequence identity) to SEQ ID NO:603 and a light chain variable region comprising an amino acid sequence that has at least 90% sequence identity (90%, 92%, 94%, 96%, 98%, 99%, or 100% sequence identity) to SEQ ID NO:463. In some embodiments, the isolated antibody comprises a heavy chain variable region comprising the sequence of SEQ ID NO:603 and a light chain variable region comprising the sequence of SEQ ID NO:463.

[0129] In some embodiments of the previous six aspects, the isolated antibody comprises a modified Fc polypeptide comprising the sequence of any one of SEQ ID NOS:342-353 and 516-522.

[0130] In some embodiments of the previous six aspects, the isolated antibody comprises a modified Fc polypeptide comprising the sequence of any one of SEQ ID NOS:354-365 and 523-529.

[0131] In some embodiments of the previous six aspects, the isolated antibody comprises a modified Fc polypeptide comprising the sequence of any one of SEQ ID NOS:366-377 and 530-536.

[0132] In some embodiments of the previous six aspects, the isolated antibody comprises a modified Fc polypeptide comprising the sequence of any one of SEQ ID NOS:378-389 and 537-543.

[0133] In some embodiments of the previous six aspects, the isolated antibody comprises a modified Fc polypeptide comprising the sequence of any one of SEQ ID NOS:390-401 and 544-550.

[0134] In some embodiments of the previous six aspects, the isolated antibody comprises a modified Fc polypeptide comprising the sequence of any one of SEQ ID NOS:402-413 and 551-557.

[0135] In some embodiments of the previous six aspects, the isolated antibody comprises a modified Fc polypeptide comprising the sequence of any one of SEQ ID NOS:271-278, 476-479, and 558-564.

[0136] In some embodiments of the previous six aspects, the isolated antibody comprises a modified Fc polypeptide comprising the sequence of any one of SEQ ID NOS:480-491 and 565-571.

[0137] In some embodiments of the previous six aspects, the isolated antibody comprises a modified Fc polypeptide comprising the sequence of any one of SEQ ID NOS:492-503 and 572-578.

[0138] In some embodiments of the previous six aspects, the isolated antibody comprises a modified Fc polypeptide comprising the sequence of any one of SEQ ID NOS:504-515 and 579-585.

[0139] In some embodiments, the modified Fc polypeptide is fused to a heavy chain variable region of the isolated antibody.

[0140] In some embodiments, the modified Fc polypeptide binds to the apical domain of the transferrin receptor. In some embodiments, the binding of the antibody or antigen-binding portion thereof to the transferrin receptor does not substantially inhibit binding of transferrin to the transferrin receptor.

[0141] In some embodiments, the modified Fc polypeptide has at least 75%, or at least 80%, 90%, 92%, or 95%, amino acid sequence identity to the corresponding wild-type Fc polypeptide. In some embodiments, the corresponding wild-type Fc polypeptide is a human IgG1, IgG2, IgG3, or IgG4 Fc polypeptide.

[0142] In some embodiments, uptake into the brain of the antibody or antigen-binding portion thereof is at least ten-fold greater as compared to the uptake of the antibody or antigen-binding portion thereof without the modified Fc polypeptide that result in transferrin receptor binding.

[0143] In some embodiments, the antibody (or antigen-binding portion thereof) specifically binds to the human Tau protein with a binding affinity of less than about 50 nM. In some embodiments, the antibody specifically binds to the human Tau protein with a binding affinity of about 1 pM to about 50 nM. In some embodiments, the antibody specifically binds to the human Tau protein with a binding affinity of about 50 pM to about 50 nM. In some embodiments, the antibody specifically binds to a phosphorylated human Tau protein and/or an unphosphorylated human Tau protein. In some embodiments, the antibody specifically binds to both a phosphorylated human Tau protein and an unphosphorylated human Tau protein. In some embodiments, the antibody specifically binds to two or more splice isoforms of the human Tau protein selected from the group consisting of 2N4R, 2N3R, 1N4R, 1N3R, 0N4R, and 0N3R. In some embodiments, the antibody specifically binds to all of the splice isoforms 2N4R, 2N3R, 1N4R, 1N3R, 0N4R, and 0N3R of the human Tau protein. In some embodiments, the antibody specifically binds to an unphosphorylated form and/or a phosphorylated form for two or more (e.g., 2, 3, 4, 5, or 6) of the splice isoforms 2N4R, 2N3R, 1N4R, 1N3R, 0N4R, and 0N3R. In some embodiments, the antibody specifically binds to both an unphosphorylated form and a phosphorylated form for each of the splice isoforms 2N4R, 2N3R, 1N4R, 1N3R, 0N4R, and 0N3R. In some embodiments, the antibody exhibits cross-reactivity with a cynomolgus monkey Tau protein and/or a mouse Tau protein.

[0144] In some embodiments, the antibody (or antigen-binding portion thereof) is a monoclonal antibody. In some embodiments, the antibody is a chimeric antibody. In some embodiments, the antibody is a humanized antibody. In some embodiments, the antibody is a fully human antibody. In some embodiments, the antigen-binding portion is a Fab, a F(ab′)₂, a scFv, or a bivalent scFv.

[0145] In another aspect, antigen-binding fragments that specifically bind to a human Tau protein are provided. In some embodiments, the antigen-binding fragment further comprises an Fc polypeptide. In some embodiments, the Fc polypeptide is a modified Fc polypeptide. In some embodiments, the Fc polypeptide contains one or more of the modifications described herein, e.g., to promote heterodimerization, reduce effector function, extend serum half-life, and/or bind to a transferrin receptor. As a non-limiting example, the antigen-binding fragment may include a Fab fragment that further comprises an Fc polypeptide, e.g., a Fab-Fc fusion. In other embodiments, the antigen-binding fragment further comprises a first Fc polypeptide and a second Fc polypeptide. In some embodiments, the first Fc polypeptide is a modified Fc polypeptide and/or the second Fc polypeptide is a modified Fc polypeptide. In some embodiments, the first Fc polypeptide and/or the second Fc polypeptide contains one or more of the modifications described herein, e.g., to promote heterodimerization, reduce effector function, extend serum half-life, and/or bind to a transferrin receptor. As a non-limiting example, the antigen-binding fragment may include a F(ab′)₂ fragment that further comprises a first Fc polypeptide and a second Fc polypeptide, e.g., a F(ab′)₂-Fc fusion.

[0146] In another aspect, pharmaceutical compositions are provided. In some embodiments, the pharmaceutical composition comprises an antibody that specifically binds to a human Tau protein as described herein and further comprises one or more pharmaceutically acceptable excipients.

[0147] In another aspect, multispecific antibodies (e.g., bispecific antibodies) are provided. In some embodiments, the antibody is a bispecific antibody comprising an antibody that specifically binds to a human Tau protein as described herein.

[0148] In yet another aspect, isolated polynucleotides are provided. In some embodiments, the isolated polynucleotide comprises a nucleotide sequence encoding an isolated antibody that specifically binds to a human Tau protein as described herein. In another aspect, vectors and host cells comprising such an isolated polynucleotide are provided.

[0149] In yet another aspect, antibodies are provided that compete for specific binding to a human Tau protein with an antibody as described herein.

[0150] In still another aspect, methods of preventing, reducing, or inhibiting Tau oligomerization and/or Tau aggregation (e.g., in a subject) are provided. In some embodiments, the method comprises administering to a subject an antibody (or antigen-binding portion) that specifically binds to a human Tau protein as described herein, or a pharmaceutical composition or bispecific antibody comprising an anti-Tau antibody as described herein. In some embodiments, the subject has a neurodegenerative disease such as a tauopathy (e.g., a neurodegenerative tauopathy).

[0151] In yet another aspect, methods of preventing or reducing pathological Tau seeding and/or spreading in a brain of a subject are provided. In some embodiments, the method comprises administering to the subject an antibody (or antigen-binding portion) that specifically binds to a human Tau protein as described herein, or a pharmaceutical composition or bispecific antibody comprising an anti-Tau antibody as described herein. In some embodiments, the subject has a neurodegenerative disease such as a tauopathy (e.g., a neurodegenerative tauopathy).

[0152] In yet another aspect, methods of treating a neurodegenerative disease are provided. In some embodiments, the neurodegenerative disease is a tauopathy (e.g., a neurodegenerative tauopathy). In some embodiments, the method comprises administering to the subject an antibody (or antigen-binding portion) that specifically binds to a human Tau protein as described herein, or a pharmaceutical composition or bispecific antibody comprising an anti-Tau antibody as described herein.

[0153] In some embodiments, the neurodegenerative tauopathy is selected from the group consisting of Alzheimer's disease, primary age-related tauopathy, progressive supranuclear palsy (PSP), frontotemporal dementia, frontotemporal dementia with parkinsonism linked to chromosome 17, argyrophilic grain dementia, amyotrophic lateral sclerosis/parkinsonism-dementia complex of Guam, corticobasal degeneration, chronic traumatic encephalopathy, Creutzfeldt-Jakob disease, dementia pugilistica, diffuse neurofibrillary tangles with calcification, Down's syndrome, familial British dementia, familial Danish dementia, Gerstmann-Straussler-Scheinker disease, globular glial tauopathy, Guadeloupean parkinsonism with dementia, Guadelopean PSP, Hallevorden-Spatz disease, inclusion-body myositis, multiple system atrophy, myotonic dystrophy, neurofibrillary tangle-predominant dementia, Niemann-Pick disease type C, pallido-ponto-nigral degeneration, Parkinson's disease, Pick's disease, postencephalitic parkinsonism, prion protein cerebral amyloid angiopathy, progressive subcortical gliosis, subacute sclerosing panencephalitis, Huntington's disease, and tangle only dementia. In some embodiments, the neurodegenerative tauopathy is Alzheimer's disease.

[0154] In another aspect, anti-Tau antibodies for use in a method of preventing, reducing, or inhibiting Tau oligomerization and/or Tau aggregation are provided. In some embodiments, an antibody or antigen-binding portion thereof that specifically binds to a human Tau protein as described herein, or a pharmaceutical composition or bispecific antibody comprising an anti-Tau antibody as described herein, is for use in a method of preventing, reducing, or inhibiting Tau oligomerization. In some embodiments, an antibody or antigen-binding portion thereof that specifically binds to a human Tau protein as described herein, or a pharmaceutical composition or bispecific antibody comprising an anti-Tau antibody as described herein, is for use in a method of preventing, reducing, or inhibiting Tau aggregation.

[0155] In yet another aspect, anti-Tau antibodies for use in a method of preventing or reducing pathological Tau seeding and/or spreading (e.g., in a brain of a subject) are provided. In some embodiments, an antibody or antigen-binding portion thereof that specifically binds to a human Tau protein as described herein, or a pharmaceutical composition or bispecific antibody comprising an anti-Tau antibody as described herein, is for use in a method of preventing or reducing pathological Tau seeding and/or spreading.

[0156] In still another aspect, anti-Tau antibodies for use in a method of treating a neurodegenerative disease are provided. In some embodiments, the neurodegenerative disease is a tauopathy (e.g., a neurodegenerative tauopathy). In some embodiments, an antibody or antigen-binding portion thereof that specifically binds to a human Tau protein as described herein, or a pharmaceutical composition or bispecific antibody comprising an anti-Tau antibody as described herein, is for use in a method of treating a neurodegenerative disease (e.g., a tauopathy). In some embodiments, an antibody or antigen-binding portion thereof that specifically binds to a human Tau protein as described herein, or a pharmaceutical composition or bispecific antibody comprising an anti-Tau antibody as described herein, is for use in a method of treating a neurodegenerative tauopathy selected from the group consisting of Alzheimer's disease, primary age-related tauopathy, progressive supranuclear palsy (PSP), frontotemporal dementia, frontotemporal dementia with parkinsonism linked to chromosome 17, argyrophilic grain dementia, amyotrophic lateral sclerosis/parkinsonism-dementia complex of Guam, corticobasal degeneration, chronic traumatic encephalopathy, Creutzfeldt-Jakob disease, dementia pugilistica, diffuse neurofibrillary tangles with calcification, Down's syndrome, familial British dementia, familial Danish dementia, Gerstmann-Straussler-Scheinker disease, globular glial tauopathy, Guadeloupean parkinsonism with dementia, Guadelopean PSP, Hallevorden-Spatz disease, inclusion-body myositis, multiple system atrophy, myotonic dystrophy, neurofibrillary tangle-predominant dementia, Niemann-Pick disease type C, pallido-ponto-nigral degeneration, Parkinson's disease, Pick's disease, postencephalitic parkinsonism, prion protein cerebral amyloid angiopathy, progressive subcortical gliosis, subacute sclerosing panencephalitis, Huntington's disease, and tangle only dementia.

[0157] In yet another aspect, the use of an anti-Tau antibody as described herein (or an antigen-binding portion thereof as described herein, or a pharmaceutical composition or bispecific antibody comprising an anti-Tau antibody as described herein) in the manufacture of a medicament for the prevention, reduction, or inhibition of Tau oligomerization and/or for the prevention, reduction, or inhibition of Tau aggregation is provided.

[0158] In still another aspect, the use of an anti-Tau antibody as described herein (or an antigen-binding portion thereof as described herein, or a pharmaceutical composition or bispecific antibody comprising an anti-Tau antibody as described herein) in the manufacture of a medicament for the prevention or reduction of pathological Tau seeding and/or spreading (e.g., in a brain of a subject) is provided.

[0159] In yet another aspect, the use of an anti-Tau antibody as described herein (or an antigen-binding portion thereof as described herein, or a pharmaceutical composition or bispecific antibody comprising an anti-Tau antibody as described herein) in the manufacture of a medicament for the treatment of a neurodegenerative disease (e.g., a tauopathy) is provided. In some embodiments, the use of an anti-Tau antibody as described herein is for the manufacture of a medicament for the treatment of a tauopathy selected from the group consisting of Alzheimer's disease, primary age-related tauopathy, progressive supranuclear palsy (PSP), frontotemporal dementia, frontotemporal dementia with parkinsonism linked to chromosome 17, argyrophilic grain dementia, amyotrophic lateral sclerosis/parkinsonism-dementia complex of Guam, corticobasal degeneration, chronic traumatic encephalopathy, Creutzfeldt-Jakob disease, dementia pugilistica, diffuse neurofibrillary tangles with calcification, Down's syndrome, familial British dementia, familial Danish dementia, Gerstmann-Straussler-Scheinker disease, globular glial tauopathy, Guadeloupean parkinsonism with dementia, Guadelopean PSP, Hallevorden-Spatz disease, inclusion-body myositis, multiple system atrophy, myotonic dystrophy, neurofibrillary tangle-predominant dementia, Niemann-Pick disease type C, pallido-ponto-nigral degeneration, Parkinson's disease, Pick's disease, postencephalitic parkinsonism, prion protein cerebral amyloid angiopathy, progressive subcortical gliosis, subacute sclerosing panencephalitis, Huntington's disease, and tangle only dementia.

### BRIEF DESCRIPTION OF THE DRAWINGS

[0160] FIG. 1. Workflow of anti-Tau antibody discovery using phage-display technology.

[0161] FIGS. 2A-2D. Production of Tau antigen. (A) Amino acid sequence of Tau produced in E. coli, including the His6-Smt3 tag (SEQ ID NO:3). (B) SDS-PAGE gel of the original uncleaved Tau and Tau product cleaved with ubiquitin-like-specific protease 1 (Ulp1) to remove the tag. (C) SDS-PAGE gel of the final purified un-tagged recombinant Tau (r-Tau) antigen (“Tau-441”). (D) Western blots showing phosphorylation of r-Tau. HT7 is a commercially available anti-Tau antibody included as a control for total Tau.

[0162] FIG. 3. Sequence alignment of clone 1C7 with human immunoglobulin kappa variable 4 (IGKV4) (light chain) and immunoglobulin heavy variable 3 (IGHV3) (heavy chain) sequences. Kabat numbers that are shaded represent Vernier positions that make critical contacts within the antibody to support its interaction with the antigen. In the 1C7 sequence, amino acids that are shaded represent positions that differ with respect to the corresponding IGKV4 or IGHV3 sequences.

[0163] FIG. 4. Sequence alignment of clone 1A1 with human immunoglobulin kappa variable 2 (IGKV2) (light chain) and immunoglobulin heavy variable 1 (IGHV1) (heavy chain) sequences. Kabat numbers that are shaded represent Vernier positions that make critical contacts within the antibody to support its interaction with the antigen. In the 1A1 sequence, amino acids that are shaded represent positions that differ with respect to the corresponding IGKV2 or IGHV1 sequences.

[0164] FIG. 5. Sequence alignment of clone 1A5 with human immunoglobulin kappa variable 2 (IGKV2) (light chain) and immunoglobulin heavy variable 1 (IGHV1) (heavy chain) sequences. Kabat numbers that are shaded represent Vernier positions that make critical contacts within the antibody to support its interaction with the antigen. In the 1A5 sequence, amino acids that are shaded represent positions that differ with respect to the corresponding IGKV2 or IGHV1 sequences.

[0165] FIG. 6. Sequence alignment of clone 1D10 with human immunoglobulin kappa variable 2 (IGKV2) (light chain) and immunoglobulin heavy variable 1 (IGHV1) (heavy chain) sequences. Kabat numbers that are shaded represent Vernier positions that make critical contacts within the antibody to support its interaction with the antigen. In the 1D10 sequence, amino acids that are shaded represent positions that differ with respect to the corresponding IGKV2 or IGHV1 sequences.

[0166] FIG. 7. Sequence alignment of clone 1G7 with human immunoglobulin kappa variable 2 (IGKV2) (light chain) and immunoglobulin heavy variable 1 (IGHV1) (heavy chain) sequences. Kabat numbers that are shaded represent Vernier positions that make critical contacts within the antibody to support its interaction with the antigen. In the 1G7 sequence, amino acids that are shaded represent positions that differ with respect to the corresponding IGKV2 or IGHV1 sequences.

[0167] FIG. 8. ELISAs of chimeric IgG antibodies 1A5, 1C7, 1G7, and 1D10 analyzing binding of the antibodies to all splice isoforms of human Tau (Tau441 (2N4R), Tau352 (0N3R), Tau381 (1N3R), Tau410 (2N3R), Tau383 (0N4R), and Tau412 (1N4R)) and to hyperphosphorylated Tau441 (p-Tau).

[0168] FIGS. 9A-9E. Biacore™ analysis of chimeric IgG binding to full-length human Tau (Tau441) for antibodies 1C7 (A), 1A1 (B), 1A5 (C), 1D10 (D), and 1G7 (E).

[0169] FIGS. 10A and 10B. Epitopes of selected chimeric IgG clones. (A) Clone 1C7 recognizes an epitope within amino acids 111-125 of human Tau 2N4R (SEQ ID NO: 1). (B) Clone 1A1 recognizes an epitope within amino acids 251-270 of human Tau 2N4R (SEQ ID NO: 1), with the strongest binding within amino acids 256-270 (underlined), and also recognizes an epitope within amino acids 346-360 of human Tau 2N4R (SEQ ID NO:1).

[0170] FIG. 11. Epitope confirmation of chimeric IgG clones 1A1, 1A5, 1D10, and 1G7 and phosphorylation analysis. Upper panel: Peptide corresponding to amino acids 251-270 of SEQ ID NO: 1. Four different peptides corresponding to the 251-270 epitope of SEQ ID NO: 1 were tested: an unphosphorylated peptide, a peptide phosphorylated at the serine in position 258 (pSer258), a peptide phosphorylated at the serine in position 262 (pSer262), and a peptide having both pSer258 and pSer262. Lower panel: Peptide corresponding to amino acids 346-360 of SEQ ID NO: 1. Four different peptides corresponding to the 346-360 epitope of SEQ ID NO:1 were tested: an unphosphorylated peptide, a peptide phosphorylated at the serine in position 352 (pSer352), a peptide phosphorylated at the serine in position 356 (pSer356), and a peptide having both pSer352 and pSer356. For each assay, peptides were analyzed at dilutions of 250, 125, 63.5, 31.25, 15.6, 7.8, 3.9, and 0 ng (from left to right).

[0171] FIGS. 12A and 12B. Chimeric IgG clones 1A1 and 1C7 inhibit Tau seeding by human brain lysate. (A) Tau FRET biosensor cells are plated and then incubated for 24 hrs in the presence of human brain lysate containing Tau, then fixed and imaged for Tau aggregation (FRET). (B) Pre-incubation of Tau antibodies with brain lysate inhibited seeding and aggregation of Tau for the benchmark antibody (Ab306), 1A1, and 1C7. Anti-RSV was used as a negative control.

[0172] FIG. 13. In vivo pharmacokinetic analysis for chimeric IgG clones 1A1 and 1C7.

[0173] FIGS. 14A and 14B. ELISAs of chimeric anti-Tau antibody 1C7 analyzing binding of the antibody to variants of full-length wild-type Tau with a single alanine mutations.

[0174] FIG. 15A. An outline of the plasma 7-day target engagement study of chimeric IgG clones 1C7 and 1A1 in PS19 Tau transgenic mice.

[0175] FIG. 15B. Chimeric IgG clones 1A1 and 1C7 both have expected PK in plasma compared to negative control or benchmark anti-Tau clones (Ab306 or Ab017).

[0176] FIG. 15C. Plasma total Tau levels increased 2 days post-dose of anti-Tau antibody Ab017, chimeric IgG clone 1C7, or chimeric IgG clone 1A1 and remained high for at least 7 days post-dose.

[0177] FIG. 15D. Plasma bound Tau levels also increased 2 days post-dose of anti-Tau antibody Ab017, chimeric IgG clone 1C7, or chimeric IgG clone 1A1. This effect was sustained well in the chimeric IgG clone 1C7 for at least 7 days post-dose.

[0178] FIG. 16A. An outline of the plasma and brain 2-day target engagement study of chimeric IgG clone 1C7 in PS19 Tau transgenic mice.

[0179] FIGS. 16B-16D. Chimeric IgG clone 1C7 has expected PK in plasma and brain compared to negative control or benchmark anti-Tau antibody Ab017.

[0180] FIGS. 16E and 16F. Both chimeric IgG clone 1C7 and the benchmark anti-Tau antibody Ab017 significantly increased the plasma total (E) and bound (F) Tau levels at 2 days post-dose.

[0181] FIG. 16G. Chimeric IgG clone 1C7 also bound to Tau in the CNS as indicated by the observed increase in bound Tau in the CSF at 2 days post-dose.

[0182] FIG. 17. Chimeric IgG clone 1C7 and the benchmark anti-Tau antibody Ab017 were able to pulldown Tau from Alzheimer's disease (AD) patient CSF, anti-Tau 1A1 was not, indicating the epitope for antibody 1A1 is either not present or inaccessible in CSF Tau.

[0183] FIG. 18. Workflow of anti-Tau antibody discovery using a hybridoma technology.

[0184] FIGS. 19A-19C. ELISAs of murine anti-Tau hybridoma antibodies 17G2.A1 (A), 19F7.C9 (B), and 24D2.B2 (C) analyzing binding of the antibodies to recombinant Tau441 (r-Tau), hyperphosphorylated Tau441 (p-Tau), cyno Tau441 (cyno-Tau), splice isoforms of human Tau (Tau352 (0N3R), Tau383 (0N4R), Tau381 (1N3R), Tau410 (2N3R), and Tau441 (2N4R)), N-terminal truncated Tau (Tau (50-441)), and C-terminal truncated Tau (Tau (1-421)).

[0185] FIGS. 20A-20C. Biacore™ analysis of anti-Tau hybridoma antibodies binding to full-length human Tau (Tau441) for antibodies 17G2.A1 (A), 19F7.C9 (B), and 24D2.B2 (C).

[0186] FIG. 21. Anti-Tau 17G2.A1 binds to Tau in human cerebral spinal fluid (CSF) from Alzheimer's disease (AD) patients.

[0187] FIGS. 22A and 22B. ELISAs of murine anti-Tau hybridoma antibody 17G2.A1 analyzing direct binding (A) and competition binding (B) of the antibody to epitope GEPPKSGDRSGYSSPGSPGT (SEQ ID NO:178).

[0188] FIGS. 23A-23C. Representative sensorgrams of anti-Tau antibody 1C7/3C.35.21 binding to human Tau (400 pM) (A), chimeric IgG clone 1C7 binding to human Tau (440 pM) (B), and anti-Tau antibody 1C7/3C.35.21 binding to transferrin receptor (TfR) (C).

[0189] FIG. 24. A representative sensorgram showing that anti-Tau antibody 1C7/3C.35.21 binds to Tau and TfR (trace A) or Tau alone (trace B). No interaction is observed between Tau and TfR in the absence of 1C7/3C.35.21 (trace C) and neither 1C7/3C.35.21 nor TfR bind to sensor tips non-specifically (trace D).

[0190] FIG. 25. Chimeric IgG clones 1C7 (Tau^{1C7}) and Tau^{1C7/3C.35.21} inhibit Tau seeding by human brain lysate. Pre-incubation of Tau antibodies with brain lysate inhibited seeding and aggregation of Tau for Tau^{1C7} and Tau^{1C7/3C.35.21}.

[0191] FIGS. 26A and 26B. In vivo pharmacokinetic analysis (plasma concentrations (FIG. 26A) and clearance values (FIG. 26B)) for various anti-Tau clones.

### DETAILED DESCRIPTION OF THE INVENTION

### I. Introduction

[0192] The present invention relates to the discovery of antibodies that have the ability to specifically bind to Tau protein. In one aspect, antibodies having the ability to specifically bind to both phosphorylated Tau protein and unphosphorylated Tau protein are provided. In some embodiments, the anti-Tau antibodies described herein specifically bind to multiple isoforms of human Tau (2N4R, 2N3R, 1N4R, 1N3R, 0N4R, and/or 0N3R). In some embodiments, the anti-Tau antibodies also exhibit cross-reactivity to mouse Tau and/or cynomolgus monkey Tau.

[0193] In some embodiments, the anti-Tau antibody recognizes more than one epitope of Tau protein. In some embodiments, the anti-Tau antibody is fused to a modified Fc polypeptide that specifically binds to a transferrin receptor. In some embodiments, the anti-Tau antibody comprises one or more modifications that promote heterodimerization, reduce effector function, and/or increase serum-half-life. In some embodiments, the anti-Tau antibody comprises a native FcRn binding site. In some embodiments, the anti-Tau antibody is a dual epitope antibody. As described below in the Examples section, anti-Tau antibodies have been identified that recognize two distinct epitopes within full-length Tau. Tau is a phosphoprotein, and phosphorylation of Tau can affect the ability of an antibody to bind to an epitope that the antibody recognizes in an unphosphorylated state. Thus, for binding to a phosphorylated form of Tau in which an epitope contains a phosphorylation site, dual epitope antibodies provide the advantage of being able to recognize a second binding site in the event that one binding site in the Tau antigen has been phosphorylated. Additionally, as described below, anti-Tau antibodies have been identified that recognize a Tau epitope both in its unphosphorylated form and its phosphorylated form.

[0194] The anti-Tau antibodies described herein are useful for, as non-limiting examples, preventing, reducing, or inhibiting pathological Tau seeding, spreading, oligomerization, and/or aggregation. Accordingly, antibodies of the present invention are useful for preventing or treating neurodegenerative diseases such as a tauopathy (e.g., Alzheimer's disease).

### II. Definitions

[0195] As used herein, the singular forms “a”, “an” and “the” include plural referents unless the content clearly dictates otherwise. Thus, for example, reference to “an antibody” optionally includes a combination of two or more such molecules, and the like.

[0196] As used herein, the terms “about” and “approximately,” when used to modify an amount specified in a numeric value or range indicate that the numeric value as well as reasonable deviations from the value known to the skilled person in the art, for example ±20%, ±10%, or ±5%, are within the intended meaning of the recited value.

[0197] As used herein, the term “Tau protein” refers to a native (i.e., wild-type) Tau protein from any vertebrate source, such as but not limited to human, non-human primates (e.g., cynomolgus monkey), rodents (e.g., mice), and other mammals. As used herein, the term “Tau protein” encompasses a “full-length” Tau protein having a length of 441 amino acids (SEQ ID NO: 1) as well as other naturally occurring isoforms of Tau. It will be recognized by a person of ordinary skill in the art that in humans, there are six isoforms of Tau that result from alternative splicing of the gene encoding Tau (microtubule-associated protein, MAPT): 2N4R, having a length of 441 amino acids (SEQ ID NO:1); 1N4R, having a length of 412 amino acids (SEQ ID NO:56); 2N3R, having a length of 410 amino acids (SEQ ID NO:54); 0N4R, having a length of 383 amino acids (SEQ ID NO:55); 1N3R, having a length of 381 amino acids (SEQ ID NO:53); and 0N3R, having a length of 352 amino acids (SEQ ID NO:52).

[0198] As used herein, the terms “an antibody that specifically binds to a Tau protein” and “anti-Tau antibody” interchangeably refer to an antibody that specifically binds to a Tau protein (e.g., unphosphorylated Tau, phosphorylated Tau, total Tau (phosphorylated and unphosphorylated Tau), or a Tau splice isoform). In some embodiments, an anti-Tau antibody is an antibody that specifically binds to multiple forms of Tau protein (e.g., multiple Tau splice isoforms, unphosphorylated Tau, and/or phosphorylated Tau). In some embodiments, an anti-Tau antibody is an antibody that specifically binds to all six human Tau splice isoforms and to unphosphorylated Tau.

[0199] As used herein, the term “antibody” refers to a protein functionally defined as a binding protein and structurally defined as comprising an amino acid sequence that is recognized by one of skill as being derived from a variable region of an immunoglobulin encoding gene. The term encompasses intact polyclonal antibodies, intact monoclonal antibodies, single chain antibodies, multispecific antibodies such as bispecific antibodies, monospecific antibodies, monovalent antibodies, chimeric antibodies, humanized antibodies, and human antibodies. The term “antibody,” as used herein, also includes antibody fragments that retain binding specificity, including but not limited to Fab, F(ab′)₂, Fv, scFv, and bivalent scFv. An antibody can consist of one or more polypeptides substantially encoded by immunoglobulin genes or fragments of immunoglobulin genes. The recognized immunoglobulin genes include the kappa, lambda, alpha, gamma, delta, epsilon, and mu constant region genes, as well as myriad immunoglobulin variable region genes. Light chains are classified as either kappa or lambda. Heavy chains are classified as gamma, mu, alpha, delta, or epsilon, which in turn define the immunoglobulin classes, IgG, IgM, IgA, IgD and IgE, respectively.

[0200] An exemplary immunoglobulin (antibody) structural unit comprises a tetramer. Each tetramer is composed of two identical pairs of polypeptide chains, each pair having one “light” (about 25 kD) and one “heavy” chain (about 50-70 kD). The N-terminus of each chain defines a variable region of about 100 to 110 or more amino acids primarily responsible for antigen recognition. The terms “variable light chain” (VL) and “variable heavy chain” (VH) refer to these light and heavy chains, respectively.

[0201] The term “variable region” refers to a domain in an antibody heavy chain or light chain that derived from a germline Variable (V) gene, Diversity (D) gene, or Joining (J) gene (and not derived from a Constant (C t and CS) gene segment), and that gives an antibody its specificity for binding to an antigen. Typically, an antibody variable region comprises four conserved “framework” regions interspersed with three hypervariable “complementarity determining regions.”

[0202] The term “complementarity determining region” or “CDR” refers to the three hypervariable regions in each chain that interrupt the four framework regions established by the light and heavy chain variable regions. The CDRs are primarily responsible for antibody binding to an epitope of an antigen. The CDRs of each chain are typically referred to as CDR1, CDR2, and CDR3, numbered sequentially starting from the N-terminus, and are also typically identified by the chain in which the particular CDR is located. Thus, a VH CDR3 or CDR-H3 is located in the variable region of the heavy chain of the antibody in which it is found, whereas a VL CDR1 or CDR-L1 is the CDR1 from the variable region of the light chain of the antibody in which it is found.

[0203] The “framework regions” or “FRs” of different light or heavy chains are relatively conserved within a species. The framework region of an antibody, that is the combined framework regions of the constituent light and heavy chains, serves to position and align the CDRs in three-dimensional space. Framework sequences can be obtained from public DNA databases or published references that include germline antibody gene sequences. For example, germline DNA sequences for human heavy and light chain variable region genes can be found in the “VBASE2” germline variable gene sequence database for human and mouse sequences.

[0204] The amino acid sequences of the CDRs and framework regions can be determined using various well-known definitions in the art, e.g., Kabat, Chothia, international ImMunoGeneTics database (IMGT), AbM, and observed antigen contacts (“Contact”). In some embodiments, CDRs are determined according to the Contact definition. See, MacCallum et al., J. Mol. Biol., 262:732-745 (1996). In some embodiments, CDRs are determined by a combination of Kabat, Chothia, and Contact CDR definitions.

[0205] The terms “antigen-binding portion” and “antigen-binding fragment” are used interchangeably herein and refer to one or more fragments of a molecule, e.g., an antibody, that retains the ability to specifically bind to an antigen (e.g., a Tau protein). Examples of antigen-binding fragments include, but are not limited to, a Fab fragment (a monovalent fragment consisting of the VL, VH, CL and CH1 domains), F(ab′)₂ fragment (a bivalent fragment comprising two Fab fragments linked by a disulfide bridge at the hinge region), single chain Fv (scFv), disulfide-linked Fv (dsFv), complementarity determining regions (CDRs), a VL (light chain variable region), a VH (heavy chain variable region), nanobodies, diabodies, each of which bind the antigen via a variable region, and other formats as described in Spiess et al., Mol. Immun. 67 (2015) 95-106, which is incorporated herein by reference, and any combination of these or any other functional portion of an immunoglobulin peptide capable of binding to a target antigen.

[0206] The term “epitope” refers to the area or region of an antigen to which a molecule, e.g., the CDRs of an antibody, specifically binds and can include a few amino acids or portions of a few amino acids, e.g., 5 or 6, or more, e.g., 20 or more amino acids, or portions of those amino acids. In some cases, the epitope includes non-protein components, e.g., from a carbohydrate, nucleic acid, or lipid. In some cases, the epitope is a three-dimensional moiety. Thus, for example, where the target is a protein, the epitope can be comprised of consecutive amino acids (e.g., a linear epitope), or amino acids from different parts of the protein that are brought into proximity by protein folding (e.g., a discontinuous or conformational epitope). In some embodiments, an antibody specifically binds to two distinct regions of an antigen (e.g., a Tau protein) that are not brought into proximity by protein folding, referred to herein as a “dual epitope.” In some embodiments, the epitope is phosphorylated at one amino acid (e.g., at a serine or threonine residue).

[0207] As used herein, the phrase “recognizes an epitope,” as used with reference to an anti-Tau antibody, means that the antibody CDRs interact with or specifically bind to the antigen (i.e., the Tau protein) at that epitope or a portion of the antigen containing that epitope.

[0208] As used herein, the term “multispecific antibody” refers to an antibody that comprises two or more different antigen-binding portions, in which each antigen-binding portion comprises a different variable region that recognizes a different antigen, or a fragment or portion of the antibody that binds to the two or more different antigens. As used herein, the term “bispecific antibody” refers to an antibody that comprises two different antigen-binding portions, in which each antigen-binding portion comprises a different variable region that recognizes a different antigen, or a fragment or portion of the antibody that binds to the two different antigens. In some embodiments, a bispecific antibody comprises a first antigen-binding portion comprising a first variable region that recognizes a Tau antigen and a second antigen-binding portion comprising a second variable region that recognizes an antigen other than Tau.

[0209] A “monoclonal antibody” refers to antibodies produced by a single clone of cells or a single cell line and consisting of or consisting essentially of antibody molecules that are identical in their primary amino acid sequence.

[0210] A “polyclonal antibody” refers to a pool of antibodies obtained from a heterogeneous population of antibodies in which different antibodies in the population bind to different epitopes of an antigen.

[0211] A “chimeric antibody” refers to an antibody molecule in which the constant region, or a portion thereof, is altered, replaced or exchanged so that the antigen-binding site (i.e., variable region, CDR, or portion thereof) is linked to a constant region of a different or altered class, effector function and/or species, or in which the variable region, or a portion thereof, is altered, replaced or exchanged with a variable region having a different or altered antigen specificity (e.g., CDR and framework regions from different species). In some embodiments, a chimeric antibody is a monoclonal antibody comprising a variable region from one source or species (e.g., mouse) and a constant region derived from a second source or species (e.g., human). Methods for producing chimeric antibodies are described in the art.

[0212] A “humanized antibody” is an antibody that retains the reactivity of a non-human antibody while being less immunogenic in humans. This can be achieved, for instance, by retaining the non-human CDR regions and replacing the remaining parts of the antibody with their human counterparts. In some instances, it is necessary to retain particular non-human framework residues in order to retain the binding affinity and/or specificity of the non-human antibody once humanized.

[0213] A “human antibody” or a “fully human antibody” is an antibody having human heavy chain and light chain sequences, typically derived from human germline genes. In some embodiments, the antibody is produced by a human cell, by a non-human animal that utilizes human antibody repertoires (e.g., transgenic mice that are genetically engineered to express human antibody sequences), or by phage display platforms.

[0214] The term “specifically binds” refers to a molecule (e.g., an antibody (or an antigen-binding portion thereof) or a modified Fc polypeptide (or a target-binding portion thereof)) that binds to an epitope or target with greater affinity, greater avidity, and/or greater duration to that epitope or target in a sample than it binds to another epitope or non-target compound (e.g., a structurally different antigen). In some embodiments, an antibody (or an antigen-binding portion thereof) or a modified Fc polypeptide (or a target-binding portion thereof) that specifically binds to an epitope or target is an antibody (or an antigen-binding portion thereof) or a modified Fc polypeptide (or a target-binding portion thereof) that binds to the epitope or target with at least 5-fold greater affinity than other epitopes or non-target compounds, e.g., at least 6-fold, 7-fold, 8-fold, 9-fold, 10-fold, 20-fold, 25-fold, 50-fold, or 100-fold greater affinity. In some embodiments, an antibody that specifically binds to a Tau protein binds to the Tau protein with at least a 5-fold greater affinity than to a non-Tau protein (e.g., at least 6-fold, at least 7-fold, at least 8-fold, at least 9-fold, or at least 10-fold greater affinity). It will be recognized by one of skill that an antibody that specifically binds to a target (e.g., a Tau protein) from one species may also specifically bind to orthologs of that target (e.g., a Tau protein).

[0215] The term “binding affinity” is used herein to refer to the strength of a non-covalent interaction between two molecules, e.g., between an antibody (or an antigen-binding portion thereof) and an antigen, or between a modified Fc polypeptide (or a target-binding portion thereof) and a target. Thus, for example, the term may refer to 1:1 interactions between an antibody (or an antigen-binding portion thereof) and an antigen or between a modified Fc polypeptide (or a target-binding portion thereof) and a target, unless otherwise indicated or clear from context. Binding affinity may be quantified by measuring an equilibrium dissociation constant (K_{D}), which refers to the dissociation rate constant (k_{d}, time⁻¹) divided by the association rate constant (kₐ, time⁻¹ M⁻¹). K_{D} can be determined by measurement of the kinetics of complex formation and dissociation, e.g., using Surface Plasmon Resonance (SPR) methods, e.g., a Biacore™ system; kinetic exclusion assays such as KinExA®; and BioLayer interferometry (e.g., using the ForteBio® Octet platform). As used herein, “binding affinity” includes not only formal binding affinities, such as those reflecting 1:1 interactions between an antibody (or an antigen-binding portion thereof) and an antigen or between a modified Fc polypeptide (or a target-binding portion thereof) and a target, but also apparent affinities for which K_{D}'s are calculated that may reflect avid binding.

[0216] The term “transferrin receptor” or “TfR” as used in the context of this invention refers to transferrin receptor protein 1. The human transferrin receptor 1 polypeptide sequence is set forth in SEQ ID NO:288. Transferrin receptor protein 1 sequences from other species are also known (e.g., chimpanzee, accession number XP_003310238.1; rhesus monkey, NP_001244232.1; dog, NP_001003111.1; cattle, NP_001193506.1; mouse, NP_035768.1; rat, NP_073203.1; and chicken, NP_990587.1). The term “transferrin receptor” also encompasses allelic variants of exemplary reference sequences, e.g., human sequences, that are encoded by a gene at a transferrin receptor protein 1 chromosomal locus. Full-length transferrin receptor protein includes a short N-terminal intracellular region, a transmembrane region, and a large extracellular domain. The extracellular domain is characterized by three domains: a protease-like domain, a helical domain, and an apical domain.

[0217] As used herein, the term “Fc polypeptide” refers to the C-terminal region of a naturally occurring immunoglobulin heavy chain polypeptide that is characterized by an Ig fold as a structural domain. An Fc polypeptide contains constant region sequences including at least the CH2 domain and/or the CH3 domain and may contain at least part of the hinge region, but does not contain a variable region.

[0218] A “modified Fc polypeptide” refers to an Fc polypeptide that has at least one mutation, e.g., a substitution, deletion or insertion, as compared to a wild-type immunoglobulin heavy chain Fc polypeptide sequence, but retains the overall Ig fold or structure of the native Fc polypeptide.

[0219] The term “FcRn” refers to the neonatal Fc receptor. Binding of Fc polypeptides to FcRn reduces clearance and increases serum half-life of the Fc polypeptide. The human FcRn protein is a heterodimer that is composed of a protein of about 50 kDa in size that is similar to a major histocompatibility (MHC) class I protein and a β2-microglobulin of about 15 kDa in size.

[0220] As used herein, an “FcRn binding site” refers to the region of an Fc polypeptide that binds to FcRn. In human IgG, the FcRn binding site, as numbered using the EU index, includes L251, M252, I253, S254, R255, T256, M428, H433, N434, H435, and Y436. These positions correspond to positions 21 to 26, 198, and 203 to 206 of SEQ ID NO:181.

[0221] As used herein, a “native FcRn binding site” refers to a region of an Fc polypeptide that binds to FcRn and that has the same amino acid sequence as the region of a naturally occurring Fc polypeptide that binds to FcRn.

[0222] The terms “CH3 domain” and “CH2 domain” as used herein refer to immunoglobulin constant region domain polypeptides. For purposes of this application, a CH3 domain polypeptide refers to the segment of amino acids from about position 341 to about position 447 as numbered according to the EU numbering scheme, and a CH2 domain polypeptide refers to the segment of amino acids from about position 231 to about position 340 as numbered according to the EU numbering scheme and does not include hinge region sequences. CH2 and CH3 domain polypeptides may also be numbered by the IMGT (ImMunoGeneTics) numbering scheme in which the CH2 domain numbering is 1-110 and the CH3 domain numbering is 1-107, according to the IMGT Scientific chart numbering (IMGT website). CH2 and CH3 domains are part of the Fc region of an immunoglobulin. An Fc region refers to the segment of amino acids from about position 231 to about position 447 as numbered according to the EU numbering scheme, but as used herein, can include at least a part of a hinge region of an antibody. An illustrative hinge region sequence is the human IgG1 hinge sequence EPKSCDKTHTCPPCP (SEQ ID NO:287).

[0223] The terms “wild-type,” “native,” and “naturally occurring” with respect to a CH3 or CH2 domain are used herein to refer to a domain that has a sequence that occurs in nature.

[0224] In the context of this invention, the term “mutant” with respect to a mutant polypeptide or mutant polynucleotide is used interchangeably with “variant.” A variant with respect to a given wild-type CH3 or CH2 domain reference sequence can include naturally occurring allelic variants. A “non-naturally” occurring CH3 or CH2 domain refers to a variant or mutant domain that is not present in a cell in nature and that is produced by genetic modification, e.g., using genetic engineering technology or mutagenesis techniques, of a native CH3 domain or CH2 domain polynucleotide or polypeptide. A “variant” includes any domain comprising at least one amino acid mutation with respect to wild-type. Mutations may include substitutions, insertions, and deletions.

[0225] The term “cross-reacts,” as used herein, refers to the ability of an antibody variable region to bind to an antigen other than the antigen against which the antibody was raised. In some embodiments, cross-reactivity refers to the ability of an antibody variable region to bind to an antigen from another species than the antigen against which the antibody was raised. As a non-limiting example, an anti-Tau antibody as described herein that is raised against a human Tau protein can exhibit cross-reactivity with a Tau protein from a different species (e.g., mouse or monkey).

[0226] The term “isolated,” as used with reference to a nucleic acid or protein (e.g., antibody), denotes that the nucleic acid or protein is essentially free of other cellular components with which it is associated in the natural state. It is preferably in a homogeneous state. Purity and homogeneity are typically determined using analytical chemistry techniques such as electrophoresis (e.g., polyacrylamide gel electrophoresis) or chromatography (e.g., high performance liquid chromatography). In some embodiments, an isolated nucleic acid or protein (e.g., antibody) is at least 85% pure, at least 90% pure, at least 95% pure, or at least 99% pure.

[0227] The term “amino acid” refers to naturally occurring and synthetic amino acids, as well as amino acid analogs and amino acid mimetics that function in a manner similar to the naturally occurring amino acids.

[0228] Naturally occurring amino acids are those encoded by the genetic code, as well as those amino acids that are later modified, e.g., hydroxyproline, γ-carboxyglutamate, and 0-phosphoserine. “Amino acid analogs” refers to compounds that have the same basic chemical structure as a naturally occurring amino acid, i.e., an α carbon that is bound to a hydrogen, a carboxyl group, an amino group, and an R group, e.g., homoserine, norleucine, methionine sulfoxide, methionine methyl sulfonium. Such analogs have modified R groups (e.g., norleucine) or modified peptide backbones, but retain the same basic chemical structure as a naturally occurring amino acid. “Amino acid mimetics” refers to chemical compounds that have a structure that is different from the general chemical structure of an amino acid, but that functions in a manner similar to a naturally occurring amino acid. Amino acids may be referred to herein by either their commonly known three letter symbols or by the one-letter symbols recommended by the IUPAC-IUB Biochemical Nomenclature Commission.

[0229] Naturally occurring amino acids are those encoded by the genetic code, as well as those amino acids that are later modified, e.g., hydroxyproline, γ-carboxyglutamate and O-phosphoserine. Naturally occurring α-amino acids include, without limitation, alanine (Ala), cysteine (Cys), aspartic acid (Asp), glutamic acid (Glu), phenylalanine (Phe), glycine (Gly), histidine (His), isoleucine (Ile), arginine (Arg), lysine (Lys), leucine (Leu), methionine (Met), asparagine (Asn), proline (Pro), glutamine (Gln), serine (Ser), threonine (Thr), valine (Val), tryptophan (Trp), tyrosine (Tyr), and combinations thereof. Stereoisomers of a naturally occurring α-amino acids include, without limitation, D-alanine (D-Ala), D-cysteine (D-Cys), D-aspartic acid (D-Asp), D-glutamic acid (D-Glu), D-phenylalanine (D-Phe), D-histidine (D-His), D-isoleucine (D-Ile), D-arginine (D-Arg), D-lysine (D-Lys), D-leucine (D-Leu), D-methionine (D-Met), D-asparagine (D-Asn), D-proline (D-Pro), D-glutamine (D-Gln), D-serine (D-Ser), D-threonine (D-Thr), D-valine (D-Val), D-tryptophan (D-Trp), D-tyrosine (D-Tyr), and combinations thereof.

[0230] The terms “polypeptide” and “peptide” are used interchangeably herein to refer to a polymer of amino acid residues in a single chain. The terms apply to amino acid polymers in which one or more amino acid residue is an artificial chemical mimetic of a corresponding naturally occurring amino acid, as well as to naturally occurring amino acid polymers and non-naturally occurring amino acid polymers. Amino acid polymers may comprise entirely L-amino acids, entirely D-amino acids, or a mixture of L and D amino acids.

[0231] The term “protein” as used herein refers to either a polypeptide or a dimer (i.e, two) or multimer (i.e., three or more) of single chain polypeptides. The single chain polypeptides of a protein may be joined by a covalent bond, e.g., a disulfide bond, or non-covalent interactions.

[0232] The terms “polynucleotide” and “nucleic acid” interchangeably refer to chains of nucleotides of any length, and include DNA and RNA. The nucleotides can be deoxyribonucleotides, ribonucleotides, modified nucleotides or bases, and/or their analogs, or any substrate that can be incorporated into a chain by DNA or RNA polymerase. A polynucleotide may comprise modified nucleotides, such as methylated nucleotides and their analogs. Examples of polynucleotides contemplated herein include single- and double-stranded DNA, single- and double-stranded RNA, and hybrid molecules having mixtures of single- and double-stranded DNA and RNA.

[0233] The term “conservative substitution” or “conservative mutation” refers to an alteration that results in the substitution of an amino acid with another amino acid that can be categorized as having a similar feature. Examples of categories of conservative amino acid groups defined in this manner can include: a “charged/polar group” including Glu (Glutamic acid or E), Asp (Aspartic acid or D), Asn (Asparagine or N), Gln (Glutamine or Q), Lys (Lysine or K), Arg (Arginine or R), and His (Histidine or H); an “aromatic group” including Phe (Phenylalanine or F), Tyr (Tyrosine or Y), Trp (Tryptophan or W), and (Histidine or H); and an “aliphatic group” including Gly (Glycine or G), Ala (Alanine or A), Val (Valine or V), Leu (Leucine or L), Ile (Isoleucine or I), Met (Methionine or M), Ser (Serine or S), Thr (Threonine or T), and Cys (Cysteine or C). Within each group, subgroups can also be identified. For example, the group of charged or polar amino acids can be sub-divided into sub-groups including: a “positively-charged sub-group” comprising Lys, Arg and His; a “negatively-charged sub-group” comprising Glu and Asp; and a “polar sub-group” comprising Asn and Gln. In another example, the aromatic or cyclic group can be sub-divided into sub-groups including: a “nitrogen ring sub-group” comprising Pro, His and Trp; and a “phenyl sub-group” comprising Phe and Tyr. In another further example, the aliphatic group can be sub-divided into sub-groups, e.g., an “aliphatic non-polar sub-group” comprising Val, Leu, Gly, and Ala; and an “aliphatic slightly-polar sub-group” comprising Met, Ser, Thr, and Cys. Examples of categories of conservative mutations include amino acid substitutions of amino acids within the sub-groups above, such as, but not limited to: Lys for Arg or vice versa, such that a positive charge can be maintained; Glu for Asp or vice versa, such that a negative charge can be maintained; Ser for Thr or vice versa, such that a free —OH can be maintained; and Gln for Asn or vice versa, such that a free —NH₂ can be maintained. In some embodiments, hydrophobic amino acids are substituted for naturally occurring hydrophobic amino acid, e.g., in the active site, to preserve hydrophobicity.

[0234] The terms “identical” or percent “identity,” in the context of two or more polypeptide sequences, refer to two or more sequences or subsequences that are the same or have a specified percentage of amino acid residues, e.g., at least 60% identity, at least 65%, at least 70%, at least 75%, at least 80%, at least 85%, at least 90%, or at least 95% or greater, that are identical over a specified region when compared and aligned for maximum correspondence over a comparison window, or designated region as measured using one a sequence comparison algorithm or by manual alignment and visual inspection.

[0235] For sequence comparison of polypeptides, typically one amino acid sequence acts as a reference sequence, to which a candidate sequence is compared. Alignment can be performed using various methods available to one of skill in the art, e.g., visual alignment or using publicly available software using known algorithms to achieve maximal alignment. Such programs include the BLAST programs, ALIGN, ALIGN-2 (Genentech, South San Francisco, Calif.) or Megalign (DNASTAR). The parameters employed for an alignment to achieve maximal alignment can be determined by one of skill in the art. For sequence comparison of polypeptide sequences for purposes of this application, the BLASTP algorithm standard protein BLAST for aligning two proteins sequence with the default parameters is used.

[0236] The terms “corresponding to,” “determined with reference to,” or “numbered with reference to” when used in the context of the identification of a given amino acid residue in a polypeptide sequence, refers to the position of the residue of a specified reference sequence when the given amino acid sequence is maximally aligned and compared to the reference sequence. Thus, for example, an amino acid residue in a modified Fc polypeptide “corresponds to” an amino acid in SEQ ID NO:181, when the residue aligns with the amino acid in SEQ ID NO:181 when optimally aligned to SEQ ID NO:181. The polypeptide that is aligned to the reference sequence need not be the same length as the reference sequence.

[0237] The terms “subject,” “individual,” and “patient,” as used interchangeably herein, refer to a mammal, including but not limited to humans, non-human primates, rodents (e.g., rats, mice, and guinea pigs), rabbits, cows, pigs, horses, and other mammalian species. In one embodiment, the subject, individual, or patient is a human.

[0238] The terms “treat” and “treatment” and the like are used herein to generally mean obtaining a desired pharmacologic and/or physiologic effect. “Treating” or “treatment” may refer to any indicia of success in the treatment or amelioration of a neurodegenerative disease (e.g., Alzheimer's disease or another neurodegenerative disease described herein), including any objective or subjective parameter such as abatement, remission, improvement in patient survival, increase in survival time or rate, diminishing of symptoms or making the disease more tolerable to the patient, slowing in the rate of degeneration or decline, or improving a patient's physical or mental well-being. The treatment or amelioration of symptoms can be based on objective or subjective parameters. The effect of treatment can be compared to an individual or pool of individuals not receiving the treatment, or to the same patient prior to treatment or at a different time during treatment.

[0239] The term “pharmaceutically acceptable excipient” refers to a non-active pharmaceutical ingredient that is biologically or pharmacologically compatible for use in humans or animals, such as, but not limited to a buffer, carrier, or preservative.

[0240] As used herein, a “therapeutic amount” or “therapeutically effective amount” of an agent (e.g., an antibody as described herein) is an amount of the agent that treats, alleviates, abates, or reduces the severity of symptoms of a disease in a subject. A “therapeutic amount” or “therapeutically effective amount” of an agent (e.g., an antibody as described herein) may improve patient survival, increase survival time or rate, diminish symptoms, make an injury, disease, or condition (e.g., a tauopathy) more tolerable, slow the rate of degeneration or decline, or improve a patient's physical or mental well-being.

[0241] The term “administer” refers to a method of delivering agents, compounds, or compositions to the desired site of biological action. These methods include, but are not limited to, topical delivery, parenteral delivery, intravenous delivery, intradermal delivery, intramuscular delivery, intrathecal delivery, colonic delivery, rectal delivery, or intraperitoneal delivery. In one embodiment, an antibody as described herein is administered intravenously.

### III. Anti-Tau Antibodies

[0242] In one aspect, antibodies and antigen-binding portions of antibodies that specifically bind to a Tau protein (e.g., human Tau) are provided. In some embodiments, the antibody or antigen-binding portion thereof specifically binds to unphosphorylated Tau. In some embodiments, the antibody or antigen-binding portion thereof specifically binds to phosphorylated Tau. In some embodiments, a phosphorylated Tau includes 1, 2, 3, 4, 5, or more phosphorylated serine and/or threonine residues. In some embodiments, the antibody or antigen-binding portion thereof specifically binds to both unphosphorylated Tau and phosphorylated Tau. In some embodiments, the antibody or antigen-binding portion specifically binds to monomeric Tau. In some embodiments, the antibody or antigen-binding portion specifically binds to oligomeric Tau. In some embodiments, the antibody or antigen-binding portion specifically binds to intracellular Tau. In some embodiments, the antibody or antigen-binding portion specifically binds to extracellular Tau.

[0243] In some embodiments, the antibody specifically binds to one or more splice isoforms of human Tau protein (i.e., one or more of the splice isoforms 2N4R, 2N3R, 1N4R, 1N3R, 0N4R, and 0N3R). In some embodiments, the antibody specifically binds to two or more splice isoforms of human Tau protein, e.g., to two, three, four, five, or all six of 2N4R, 2N3R, 1N4R, 1N3R, 0N4R, and 0N3R. In some embodiments, the antibody specifically binds to an unphosphorylated form and/or a phosphorylated form of two or more splice isoforms of human Tau protein, e.g., to two, three, four, five, or all six of 2N4R, 2N3R, 1N4R, 1N3R, 0N4R, and 0N3R. In some embodiments, the antibody specifically binds to both an unphosphorylated form and a phosphorylated form of one, two, three, four, five, or all six of the splice isoforms 2N4R, 2N3R, 1N4R, 1N3R, 0N4R, and 0N3R.

### Binding Characteristics of Anti-Tau Antibodies

[0244] In some embodiments, an anti-Tau antibody specifically binds to full-length human Tau (SEQ ID NO: 1) with high affinity. In some embodiments, the antibody has a binding affinity (K_{D}) for SEQ ID NO:1 of less than 50 nM, e.g., less than 40 nM, less than 30 nM, less than 25 nM, less than 20 nM, less than 15 nM, less than 10 nM, less than 5 nM, less than 1 nM, less than 500 pM, less than 250 pM, less than 150 pM, less than 100 pM, less than 50 pM, less than 40 pM, less than 30 pM, less than 20 pM, or less than about 10 pM. In some embodiments, the antibody has a K_{D} for SEQ ID NO:1 in the range of about 1 pM to about 50 nM, e.g., about 1 pM to about 25 nM, about 1 pM to about 10 nM, about 1 pM to about 5 nM, about 1 pM to about 500 pM, about 5 pM to about 250 pM, or about 10 pM to about 100 pM.

[0245] In some embodiments, an anti-Tau antibody specifically binds to more than one splice isoform of human Tau (e.g., two, three, four, five, or all six of the splice isoforms 2N4R, 2N3R, 1N4R, 1N3R, 0N4R, and 0N3R) with high affinity. In some embodiments, the antibody has a K_{D} for two or more isoforms of human Tau of less than 50 nM, less than 40 nM, less than 30 nM, less than 25 nM, less than 20 nM, less than 15 nM, less than 10 nM, less than 5 nM, less than 1 nM, less than 500 pM, less than 250 pM, less than 150 pM, less than 100 pM, less than 50 pM, less than 40 pM, less than 30 pM, less than 20 pM, or less than about 10 pM. In some embodiments, the antibody has a K_{D} for two or more isoforms of human Tau that is in the range of about 1 pM to about 50 nM, e.g., about 1 pM to about 25 nM, about 1 pM to about 10 nM, about 1 pM to about 5 nM, about 1 pM to about 500 pM, about 5 pM to about 250 pM, or about 10 pM to about 100 pM.

[0246] In some embodiments, the anti-Tau antibody exhibits cross-reactivity with cynomolgus monkey (“cyno”) Tau (e.g., a cyno Tau protein having the sequence of SEQ ID NO:7). In some embodiments, the anti-Tau antibody exhibits cross-reactivity with mouse Tau (e.g., a mouse Tau protein having the sequence of SEQ ID NO:6). In some embodiments, the anti-Tau antibody exhibits cross-reactivity with cynomolgus monkey Tau (e.g., a cyno Tau protein having the sequence of SEQ ID NO:7) and mouse Tau (e.g., a mouse Tau protein having the sequence of SEQ ID NO:6).

[0247] Methods for analyzing binding affinity, binding kinetics, and cross-reactivity are known in the art. These methods include, but are not limited to, solid-phase binding assays (e.g., ELISA assay), immunoprecipitation, surface plasmon resonance (e.g., Biacore™ (GE Healthcare, Piscataway, N.J.)), kinetic exclusion assays (e.g., KinExA®), flow cytometry, fluorescence-activated cell sorting (FACS), BioLayer interferometry (e.g., Octet™ (FortéBio, Inc., Menlo Park, Calif.)), and Western blot analysis. In some embodiments, ELISA is used to determine binding affinity and/or cross-reactivity. Methods for performing ELISA assays are known in the art, and are also described in the Examples section below. In some embodiments, surface plasmon resonance (SPR) is used to determine binding affinity, binding kinetics, and/or cross-reactivity. In some embodiments, kinetic exclusion assays are used to determine binding affinity, binding kinetics, and/or cross-reactivity. In some embodiments, BioLayer interferometry assays are used to determine binding affinity, binding kinetics, and/or cross-reactivity.

[0248] In some embodiments, an anti-Tau antibody recognizes an epitope of human Tau having or consisting of the sequence TPSLEDEAAGHVTQA (SEQ ID NO:35), which corresponds to residues 111-125 of SEQ ID NO:1. In some embodiments, an anti-Tau antibody recognizes an epitope within residues 111-125 of SEQ ID NO:1. In some embodiments, an anti-Tau antibody recognizes an epitope comprising at least 4, at least 5, at least 6, at least 7, at least 8, at least 9, or at least 10 amino acids within residues 111-125 of SEQ ID NO: 1. In some embodiments, an anti-Tau antibody recognizes an epitope comprising at least 4, at least 5, at least 6, at least 7, at least 8, at least 9, or at least 10 contiguous amino acids within residues 111-125 of SEQ ID NO: 1. In some embodiments, an anti-Tau antibody recognizes an epitope comprising 4-15, 4-12, 4-10, 4-8, 5-15, 5-12, 5-10, 5-8, 6-15, 6-12, 6-10, 6-8, 8-15, 8-12, 8-10, 10-15, 10-12, or 12-15 contiguous amino acids within residues 111-125 of SEQ ID NO:1. In some embodiments, the epitope is not an epitope consisting of the sequence AAGHV (SEQ ID NO:632).

[0249] In some embodiments, an anti-Tau antibody recognizes an epitope of human Tau having or consisting of the sequence PDLKNVKSKIGSTENLKHQP (SEQ ID NO:36), which corresponds to residues 251-270 of SEQ ID NO:1. In some embodiments, an anti-Tau antibody recognizes an epitope within residues 251-270 of SEQ ID NO:1. In some embodiments, an anti-Tau antibody recognizes an epitope having or consisting of the sequence VKSKIGSTENLKHQP (SEQ ID NO:37), which corresponds to residues 256-270 of SEQ ID NO: 1. In some embodiments, an anti-Tau antibody recognizes an epitope comprising or consisting of the sequence SKIGS (SEQ ID NO:39) within residues 251-270 of SEQ ID NO: 1. In some embodiments, an anti-Tau antibody recognizes an epitope comprising at least 4, at least 5, at least 6, at least 7, at least 8, at least 9, or at least 10 amino acids within residues 251-270 of SEQ ID NO:1 or within residues 256-270 of SEQ ID NO: 1. In some embodiments, an anti-Tau antibody recognizes an epitope comprising at least 4, at least 5, at least 6, at least 7, at least 8, at least 9, or at least 10 contiguous amino acids within residues 251-270 of SEQ ID NO:1 or within residues 256-270 of SEQ ID NO:1. In some embodiments, an anti-Tau antibody recognizes an epitope comprising 4-15, 4-12, 4-10, 4-8, 5-15, 5-12, 5-10, 5-8, 6-15, 6-12, 6-10, 6-8, 8-15, 8-12, 8-10, 10-15, 10-12, or 12-15 contiguous amino acids within residues 251-270 of SEQ ID NO: 1 or within residues 256-270 of SEQ ID NO: 1.

[0250] In some embodiments, an anti-Tau antibody recognizes an epitope of human Tau having or consisting of the sequence FKDRVQSKIGSLDNI (SEQ ID NO:38), which corresponds to residues 346-360 of SEQ ID NO:1. In some embodiments, an anti-Tau antibody recognizes an epitope within residues 346-360 of SEQ ID NO:1. In some embodiments, an anti-Tau antibody recognizes an epitope comprising or consisting of the sequence SKIGS (SEQ ID NO:52) within residues 346-360 of SEQ ID NO:1. In some embodiments, an anti-Tau antibody recognizes an epitope comprising at least 4, at least 5, at least 6, at least 7, at least 8, at least 9, or at least 10 amino acids within residues 346-360 of SEQ ID NO:1. In some embodiments, an anti-Tau antibody recognizes an epitope comprising at least 4, at least 5, at least 6, at least 7, at least 8, at least 9, or at least 10 contiguous amino acids within residues 346-360 of SEQ ID NO:1. In some embodiments, an anti-Tau antibody recognizes an epitope comprising 4-15, 4-12, 4-10, 4-8, 5-15, 5-12, 5-10, 5-8, 6-15, 6-12, 6-10, 6-8, 8-15, 8-12, 8-10, 10-15, 10-12, or 12-15 contiguous amino acids within residues 346-360 of SEQ ID NO: 1.

[0251] In some embodiments, an anti-Tau antibody has a dual epitope specificity and recognizes both an epitope of human Tau having, consisting of, or within the sequence PDLKNVKSKIGSTENLKHQP (SEQ ID NO:36) corresponding to residues 251-270 of SEQ ID NO: 1, and an epitope having, consisting of, or within the sequence FKDRVQSKIGSLDNI (SEQ ID NO:38) corresponding to residues 346-360 of SEQ ID NO:1. In some embodiments, an anti-Tau antibody is a dual epitope antibody that recognizes an epitope having, consisting of, or within the sequence VKSKIGSTENLKHQP (SEQ ID NO:37) corresponding to residues 256-270 of SEQ ID NO:1, and also recognizes an epitope having, consisting of, or within the sequence FKDRVQSKIGSLDNI (SEQ ID NO:38) corresponding to residues 346-360 of SEQ ID NO:1. In some embodiments, an anti-Tau antibody is a dual epitope antibody that recognizes an epitope of human Tau within residues 251-270 of SEQ ID NO:1 and also recognizes an epitope within residues 346-360 of SEQ ID NO: 1. In some embodiments, an anti-Tau antibody is a dual epitope antibody that recognizes an epitope within residues 256-270 of SEQ ID NO: 1 and also recognizes an epitope within residues 346-360 of SEQ ID NO: 1. In some embodiments, an anti-Tau antibody recognizes an epitope comprising the sequence SKIGS (SEQ ID NO:39) within residues 251-270 of SEQ ID NO:1 and/or within residues 346-360 of SEQ ID NO: 1.

[0252] In some embodiments, an anti-Tau antibody recognizes an epitope of human Tau having or consisting of the sequence GEPPKSGDRSGYSSPGSPGT (SEQ ID NO:178), which corresponds to residues 186-205 of SEQ ID NO:1. In some embodiments, an anti-Tau antibody recognizes an epitope within residues 186-205 of SEQ ID NO:1. In some embodiments, an anti-Tau antibody recognizes an epitope of human Tau having or consisting of the sequence GEPPKSGDRSGYSSP (SEQ ID NO:179), which corresponds to residues 186-200 of SEQ ID NO: 1. In some embodiments, an anti-Tau antibody recognizes an epitope within residues 186-200 of SEQ ID NO:1. In some embodiments, an anti-Tau antibody recognizes an epitope of human Tau having or consisting of the sequence SGDRSGYSSPGSPGT (SEQ ID NO:180), which corresponds to residues 191-205 of SEQ ID NO:1. In some embodiments, an anti-Tau antibody recognizes an epitope within residues 191-205 of SEQ ID NO:1. In some embodiments, an anti-Tau antibody recognizes an epitope comprising at least 4, at least 5, at least 6, at least 7, at least 8, at least 9, or at least 10 amino acids within residues 186-205 of SEQ ID NO:1, within residues 186-200 of SEQ ID NO:1, or within residues 191-205 of SEQ ID NO:1. In some embodiments, an anti-Tau antibody recognizes an epitope comprising at least 4, at least 5, at least 6, at least 7, at least 8, at least 9, or at least 10 contiguous amino acids within residues 186-205 of SEQ ID NO:1, within residues 186-200 of SEQ ID NO: 1, or within residues 191-205 of SEQ ID NO: 1. In some embodiments, an anti-Tau antibody recognizes an epitope comprising 4-15, 4-12, 4-10, 4-8, 5-15, 5-12, 5-10, 5-8, 6-15, 6-12, 6-10, 6-8, 8-15, 8-12, 8-10, 10-15, 10-12, or 12-15 contiguous amino acids within residues 186-205 of SEQ ID NO:1, within residues 186-200 of SEQ ID NO:1, or within residues 191-205 of SEQ ID NO: 1.

[0253] In some embodiments, an anti-Tau antibody recognizes an epitope of human Tau that is the same or substantially the same as the epitope recognized by an antibody clone selected from the group consisting of 19F7.C9 and 24D2.B2. In some embodiments, the epitope recognized by antibody clone 19F7.C9 or 24D2.B2 comprises one or more residues within residues 50-421 of SEQ ID NO:1. In some embodiments, the epitope recognized by antibody clone 19F7.C9 or 24D2.B2 is within residues 50-421 of SEQ ID NO:1. As used herein, the term “substantially the same,” as used with reference to an epitope recognized by an antibody clone as described herein, means that the anti-Tau antibody recognizes an epitope that is identical, within, or nearly identical to (e.g., has at least 90% sequence identity to, or has one, two, or three amino acid substitutions, e.g., conservative substitutions, relative to), or has substantial overlap with (e.g., at least 50%, 60%, 70%, 80%, 90%, or 95% overlap with) the epitope recognized by the antibody clone as described herein.

### Anti-Tau Antibody Sequences

[0254] In some embodiments, an antibody or antigen-binding portion thereof that specifically binds to a human Tau protein comprises a light chain sequence, or a portion thereof, and/or a heavy chain sequence, or a portion thereof, derived from any of the following antibodies described herein: Clone 1A1, Clone 1A5, Clone 1D10, Clone 1G7, Clone 1C7, Clone 1H G11, Clone 1H B12, Clone 17G2.A1, hulC7.v1, hulC7.v2, hulC7.v3, hulC7.v4, hulC7.v2-1, and hulC7.v2-2. The amino acid sequences of the light chain variable region (VL) and heavy chain variable region (VH) of these anti-Tau antibodies are as follows: Clone 1A1 (e.g., SEQ ID NOS:8 and 12), Clone 1A5 (e.g., SEQ ID NOS:16 and 19), Clone 1D10 (e.g., SEQ ID NOS:29 and 31), Clone 1G7 (e.g., SEQ ID NOS:32 and 34), Clone 1C7 (e.g., SEQ ID NOS:21 and 25), Clone 1H_G11 (e.g., SEQ ID NOS:40 and 41), Clone 1H B12 (e.g., SEQ ID NOS:40 and 45), Clone 17G2.A1 (e.g., SEQ ID NOS:167 and 171), hulC7.v1 (e.g., SEQ ID NOS:145 and 149), hulC7.v2 (e.g., SEQ ID NOS:146 and 149), hulC7.v3 (e.g., SEQ ID NOS:147 and 149), hulC7.v4 (e.g., SEQ ID NOS:148 and 149), hulC7.v2-1 (e.g., SEQ ID NOS:146 and 463), and hulC7.v2-2 (e.g., SEQ ID NOS:146 and 464).

[0255] In some embodiments, an anti-Tau antibody comprises a heavy chain variable region comprising an amino acid sequence that has at least 90% sequence identity (e.g., at least 91%, at least 92%, at least 93%, at least 94%, at least 95%, at least 96%, at least 97%, at least 98%, or at least 99% sequence identity) to any one of SEQ ID NOS:8, 16, 21, 29, 32, 40, 145-148, and 167. In some embodiments, an anti-Tau antibody comprises a heavy chain variable region comprising the amino acid sequence of any one of SEQ ID NOS:8, 16, 21, 29, 32, 40, 145-148, and 167. In some embodiments, a heavy chain variable region sequence having at least 90% sequence identity to a reference sequence (e.g., SEQ ID NOS:8, 16, 21, 29, 32, 40, 145-148, and 167) contains one, two, three, four, five, six, seven, eight, nine, ten or more substitutions (e.g., conservative substitutions), insertions, or deletions relative to the reference sequence but retains the ability to specifically bind to a human Tau protein and recognize one or more epitopes as described herein. In some embodiments, a heavy chain variable region contains one, two, or three substitutions (e.g., conservative substitutions) in any one of SEQ ID NOS:8, 16, 21, 29, 32, 40, 145-148, and 167.

[0256] In some embodiments, an anti-Tau antibody comprises a light chain variable region comprising an amino acid sequence that has at least 90% sequence identity (e.g., at least 91%, at least 92%, at least 93%, at least 94%, at least 95%, at least 96%, at least 97%, at least 98%, or at least 99% sequence identity) to any one of SEQ ID NOS: 12, 19, 25, 31, 34, 41, 45, 149, 171, 463, and 464. In some embodiments, an anti-Tau antibody comprises a light chain variable region comprising the amino acid sequence of any one of SEQ ID NOS: 12, 19, 25, 31, 34, 41, 45, 149, 171, 463, and 464. In some embodiments, a light chain variable region sequence having at least 90% sequence identity to a reference sequence (e.g., SEQ ID NOS:12, 19, 25, 31, 34, 41, 45, 149, 171, 463, and 464) contains one, two, three, four, five, six, seven, eight, nine, ten or more substitutions (e.g., conservative substitutions), insertions, or deletions relative to the reference sequence but retains the ability to bind to human Tau and recognize one or more epitopes as described herein. In some embodiments, a light chain variable region contains one, two, or three substitutions (e.g., conservative substitutions) in any one of SEQ ID NOS:12, 19, 25, 31, 34, 41, 45, 149, 171, 463, and 464.

[0257] In some embodiments, an anti-Tau antibody comprises a heavy chain variable region comprising an amino acid sequence that has at least 90% sequence identity (e.g., at least 91%, at least 92%, at least 93%, at least 94%, at least 95%, at least 96%, at least 97%, at least 98%, or at least 99% sequence identity) to any one of SEQ ID NOS:8, 16, 21, 29, 32, 40, 145-148, and 167 and further comprises a light chain variable region comprising an amino acid sequence that has at least 90% sequence identity (e.g., at least 91%, at least 92%, at least 93%, at least 94%, at least 95%, at least 96%, at least 97%, at least 98%, or at least 99% sequence identity) to any one of SEQ ID NOS:12, 19, 25, 31, 34, 41, 45, 149, 171, 463, and 464. In some embodiments, an anti-Tau antibody comprises a heavy chain variable region comprising the amino acid sequence of any one of SEQ ID NOS:8, 16, 21, 29, 32, 40, 145-148, and 167 and further comprises a light chain variable region comprising the amino acid sequence of any one of SEQ ID NOS:12, 19, 25, 31, 34, 41, 45, 149, 171, 463, and 464.

Anti-Tau Antibodies that Recognize an Epitope within Residues 111-125

[0258] In some embodiments, an anti-Tau antibody recognizes an epitope within residues 111-125 of SEQ ID NO: 1 (e.g., an epitope comprising at least 6 contiguous amino acids within residues 111-125), or recognizes an epitope comprising or consisting of residues 111-125 of SEQ ID NO: 1. In some embodiments, the anti-Tau antibody further comprises one or more complementarity determining region (CDR), heavy chain variable region, and/or light chain variable region sequences as described herein (e.g., as described in the Sequence Listing).

[0259] In some embodiments, an anti-Tau antibody specifically binds to a peptide having the sequence TPSLEDEAAGHVTQA (SEQ ID NO:70), which corresponds to residues 111-125 of SEQ ID NO: 1. In some embodiments, the peptide sequence set forth in SEQ ID NO:70 is sufficient for binding to the anti-Tau antibody. In some embodiments, the anti-Tau antibody further comprises one or more complementarity determining region (CDR), heavy chain variable region, and/or light chain variable region sequences as described herein (e.g., as described in the Sequence Listing).

[0260] In some embodiments, an anti-Tau antibody comprises one or more CDRs selected from the group consisting of:
[0261] (a) a heavy chain CDR1 having at least 90% sequence identity to the amino acid sequence of SEQ ID NO:22 or having up to two amino acid substitutions relative to the amino acid sequence of SEQ ID NO:22;
[0262] (b) a heavy chain CDR2 having at least 90% sequence identity to the amino acid sequence of SEQ ID NO:23 or having up to two amino acid substitutions relative to the amino acid sequence of SEQ ID NO:23;
[0263] (c) a heavy chain CDR3 having at least 90% sequence identity to the amino acid sequence of SEQ ID NO:24 or having up to two amino acid substitutions relative to the amino acid sequence of SEQ ID NO:24;
[0264] (d) a light chain CDR1 having at least 90% sequence identity to the amino acid sequence of any one of SEQ ID NOS:26 and 42 or having up to two amino acid substitutions relative to the amino acid sequence of any one of SEQ ID NOS:26 and 42;
[0265] (e) a light chain CDR2 having at least 90% sequence identity to the amino acid sequence of any one of SEQ ID NOS:27, 43, and 50 or having up to two amino acid substitutions relative to the amino acid sequence of any one of SEQ ID NOS:27, 43, and 50; and
[0266] (f) a light chain CDR3 having at least 90% sequence identity to the amino acid sequence of any one of SEQ ID NOS:28, 44, 46, and 51 or having up to two amino acid substitutions relative to the amino acid sequence of any one of SEQ ID NOS:28, 44, 46, and 51.

[0267] In some embodiments, an anti-Tau antibody comprises two, three, four, five, or all six of (a)-(f). In some embodiments, an anti-Tau antibody comprises the heavy chain CDR1 of (a), the heavy chain CDR2 of (b), and the heavy chain CDR3 of (c). In some embodiments, an anti-Tau antibody comprises the light chain CDR1 of (d), the light chain CDR2 of (e), and the light chain CDR3 of (f). In some embodiments, a CDR having up to two amino acid substitutions has one amino acid substitution relative to the reference sequence. In some embodiments, a CDR having up to two amino acid substitutions has two amino acid substitutions relative to the reference sequence. In some embodiments, the up to two amino acid substitutions are conservative substitutions.

[0268] In some embodiments, an anti-Tau antibody comprises one or more CDRs selected from the group consisting of:
[0269] (a) a heavy chain CDR1 comprising the amino acid sequence of SEQ ID NO:22;
[0270] (b) a heavy chain CDR2 comprising the amino acid sequence of SEQ ID NO:23;
[0271] (c) a heavy chain CDR3 comprising the amino acid sequence of SEQ ID NOS:24;
[0272] (d) a light chain CDR1 comprising the amino acid sequence of any one of SEQ ID NOS:26 and 42;
[0273] (e) a light chain CDR2 comprising the amino acid sequence of any one of SEQ ID NOS:27, 43, and 50; and
[0274] (f) a light chain CDR3 comprising the amino acid sequence of any one of SEQ ID NOS:28, 44, 46, and 51.

[0275] In some embodiments, an anti-Tau antibody comprises two, three, four, five, or all six of (a)-(f). In some embodiments, an anti-Tau antibody comprises the heavy chain CDR1 of (a), the heavy chain CDR2 of (b), and the heavy chain CDR3 of (c). In some embodiments, an anti-Tau antibody comprises the light chain CDR1 of (d), the light chain CDR2 of (e), and the light chain CDR3 of (f).

[0276] In some embodiments, an anti-Tau antibody comprises one or more sequences that are variants of one or more consensus sequences. As a non-limiting example, consensus sequences can be identified by aligning heavy chain or light chain sequences (e.g., CDRs) for antibodies that are from the same (or similar) germlines. In some embodiments, consensus sequences may be generated from antibodies that contain sequences that are of the same (or similar) length and/or have at least one highly similar CDR (e.g., highly similar CDR3). In some embodiments, such sequences in these antibodies may be aligned and compared to identify conserved amino acids or motifs (i.e., where alteration in sequences may alter protein function) and/or regions where variation occurs the sequences (i.e., where variation of sequence is not likely to significantly affect protein function). Alternatively, consensus sequences can be identified by aligning heavy chain or light chain sequences (e.g., CDRs) for antibodies that bind to the same or similar (e.g., overlapping) epitopes to determine conserved amino acids or motifs (i.e., where alteration in sequences may alter protein function) and regions where variation occurs in alignment of sequences (i.e., where variation of sequence is not likely to significantly affect protein function). In some embodiments, one or more consensus sequences can be identified for antibodies that recognize the same or similar epitope as 1C7. Exemplary 1C7-like consensus sequences include SEQ ID NO:50 and SEQ ID NO:51. In the consensus sequences of SEQ ID NOS:50 and 51, the capitalized letter represents an amino acid residue that is absolutely conserved among the aligned sequences (e.g., aligned CDR sequences), while “x” represents an amino acid residue that is not absolutely conserved among the aligned sequences. It will be appreciated that when selecting an amino acid to insert at a position marked by an “x” that in some embodiments, the amino acid is selected from those amino acids found at the corresponding position in the aligned sequences.

[0277] In some embodiments, the antibody comprises a light chain CDR2 sequence having the consensus sequence WASxRxS (SEQ ID NO:50). In some embodiments, the light chain CDR2 consensus sequence comprises the sequence WAS[T/Y]R[E/Y]S (SEQ ID NO:633).

[0278] In some embodiments, the antibody comprises a light chain CDR3 sequence having the consensus sequence QQYxxYPLT (SEQ ID NO:51). In some embodiments, the light chain CDR3 consensus sequence comprises the sequence QQY[N/S][S/T]YPLT (SEQ ID NO:634).

[0279] In some embodiments, an anti-Tau antibody binds to at least one of the following residues T111, P112, S113, L114, E115, D116, E117, A118, A119, G120, H121, V122, T123, Q124, or A125 of SEQ ID NO:1. In some embodiments, an anti-Tau antibody binds to at least two, three, four, five, six, seven, eight, nine, ten, eleven, twelve, thirteen, fourteen, or all fifteen of the following residues T111, P112, S113, L114, E115, D116, E117, A118, A119, G120, H121, V122, T123, Q124, or A125 of SEQ ID NO:1. In some embodiments, the anti-Tau antibody binds to contiguous residues of SEQ ID NO: 1. In some embodiments, the anti-Tau antibody binds to non-contiguous residues of SEQ ID NO: 1. In some embodiments, the anti-Tau antibody binds to both contiguous and non-contiguous residues of SEQ ID NO: 1.

[0280] In some embodiments, an anti-Tau antibody binds to at least residue T111 of SEQ ID NO: 1. In some embodiments, an anti-Tau antibody binds to at least residue P112 of SEQ ID NO: 1. In some embodiments, an anti-Tau antibody binds to at least residue S113 of SEQ ID NO:1. In some embodiments, an anti-Tau antibody binds to at least residue L114 of SEQ ID NO: 1. In some embodiments, an anti-Tau antibody binds to at least residue E115 of SEQ ID NO:1. In some embodiments, an anti-Tau antibody binds to at least residue D116 of SEQ ID NO:1. In some embodiments, an anti-Tau antibody binds to at least residue E117 of SEQ ID NO:1. In some embodiments, an anti-Tau antibody binds to at least residue A118 of SEQ ID NO:1. In some embodiments, an anti-Tau antibody binds to at least residue A119 of SEQ ID NO:1. In some embodiments, an anti-Tau antibody binds to at least residue G120 of SEQ ID NO:1. In some embodiments, an anti-Tau antibody binds to at least residue H121 of SEQ ID NO:1. In some embodiments, an anti-Tau antibody binds to at least residue V122 of SEQ ID NO:1. In some embodiments, an anti-Tau antibody binds to at least residue T123 of SEQ ID NO:1. In some embodiments, an anti-Tau antibody binds to at least residue Q124 of SEQ ID NO:1. In some embodiments, an anti-Tau antibody binds to at least residue A125 of SEQ ID NO:1. In some embodiments, an anti-Tau antibody binds to at least residues L114 and E115 of SEQ ID NO: 1.

[0281] In some embodiments, an anti-Tau antibody that recognizes an epitope within residues 111-125 of SEQ ID NO: 1 prevents, reduces, or inhibits pathological Tau seeding and/or spreading, e.g., by at least 10%, 15%, 20%, 25%, 30%, 35%, 40%, 45%, 50%, 55%, 60%, 65%, 70%, 75%, 80%, 85%, 90%, or 95% (e.g., compared to the amount of pathological Tau seeding and/or spreading in the absence of the anti-Tau antibody). In some embodiments, an anti-Tau antibody that recognizes an epitope within residues 111-125 of SEQ ID NO:1 prevents, reduces, or inhibits Tau oligomerization, e.g., by at least 10%, 15%, 20%, 25%, 30%, 35%, 40%, 45%, 50%, 55%, 60%, 65%, 70%, 75%, 80%, 85%, 90%, or 95% (e.g., compared to the amount of Tau oligomerization in the absence of the anti-Tau antibody). In some embodiments, an anti-Tau antibody that recognizes an epitope within residues 111-125 of SEQ ID NO:1 prevents, reduces, or inhibits Tau aggregation, e.g., by at least 10%, 15%, 20%, 25%, 30%, 35%, 40%, 45%, 50%, 55%, 60%, 65%, 70%, 75%, 80%, 85%, 90%, or 95% (e.g., compared to the amount of Tau aggregation in the absence of the anti-Tau antibody). In some embodiments, an anti-Tau antibody that recognizes an epitope within residues 111-125 of SEQ ID NO:1 prevents, reduces, or inhibits the binding of another anti-Tau antibody, e.g., by at least 10%, 15%, 20%, 25%, 30%, 35%, 40%, 45%, 50%, 55%, 60%, 65%, 70%, 75%, 80%, 85%, 90%, or 95% (e.g., compared to antibody binding in the absence of the anti-Tau antibody that recognizes an epitope within residues 111-125 of SEQ ID NO:1). Methods for measuring Tau seeding, spreading, oligomerization, and/or aggregation are known in the art. A specific example of one such method for measuring Tau seeding and/or aggregation is described in Example 2.

[0282] 1C7

[0283] In some embodiments, an anti-Tau antibody comprises a heavy chain CDR1 sequence comprising the amino acid sequence of SEQ ID NO:22, a heavy chain CDR2 sequence comprising the amino acid sequence of SEQ ID NO:23, and a heavy chain CDR3 sequence comprising the amino acid sequence of SEQ ID NO:24. In some embodiments, an anti-Tau antibody comprises a light chain CDR1 sequence comprising the amino acid sequence of SEQ ID NO:26, a light chain CDR2 sequence comprising the amino acid sequence of SEQ ID NO:27, and a light chain CDR3 sequence comprising the amino acid sequence of SEQ ID NO:28. In some embodiments, an anti-Tau antibody comprises a heavy chain CDR1-3 and a light chain CDR1-3 comprising the amino acid sequences of SEQ ID NOS:22, 23, 24, 26, 27, and 28, respectively.

[0284] In some embodiments, an anti-Tau antibody comprises a heavy chain variable region comprising an amino acid sequence that has at least 90% sequence identity (e.g., at least 91%, at least 92%, at least 93%, at least 94%, at least 95%, at least 96%, at least 97%, at least 98%, or at least 99% sequence identity) to SEQ ID NO:21. In some embodiments, an anti-Tau antibody comprises a heavy chain variable region comprising the amino acid sequence of SEQ ID NO:21.

[0285] In some embodiments, an anti-Tau antibody comprises a light chain variable region comprising an amino acid sequence that has at least 90% sequence identity (e.g., at least 91%, at least 92%, at least 93%, at least 94%, at least 95%, at least 96%, at least 97%, at least 98%, or at least 99% sequence identity) to SEQ ID NO:25. In some embodiments, an anti-Tau antibody comprises a light chain variable region comprising the amino acid sequence of SEQ ID NO:25.

[0286] In some embodiments, an anti-Tau antibody comprises a heavy chain variable region comprising an amino acid sequence that has at least 90% sequence identity (e.g., at least 91%, at least 92%, at least 93%, at least 94%, at least 95%, at least 96%, at least 97%, at least 98%, or at least 99% sequence identity) to SEQ ID NO:21 and further comprises a light chain variable region comprising an amino acid sequence that has at least 90% sequence identity (e.g., at least 91%, at least 92%, at least 93%, at least 94%, at least 95%, at least 96%, at least 97%, at least 98%, or at least 99% sequence identity) to SEQ ID NO:25. In some embodiments, an anti-Tau antibody comprises a heavy chain variable region comprising the amino acid sequence of SEQ ID NO:21 and further comprises a light chain variable region comprising the amino acid sequence of SEQ ID NO:25.

[0287] In some embodiments, an anti-Tau antibody is an antibody that competes for binding with an antibody as described herein (e.g., an antibody comprising a heavy chain CDR1-3 and a light chain CDR1-3 comprising the amino acid sequences of SEQ ID NOS:22, 23, 24, 26, 27, and 28, respectively, or an antibody comprising a heavy chain variable region comprising the amino acid sequence of SEQ ID NO:21 and further comprising a light chain variable region comprising the amino acid sequence of SEQ ID NO:25).

[0288] In some embodiments, an anti-Tau antibody comprises a light chain having the sequence of SEQ ID NO:315, a first heavy chain having the sequence of SEQ ID NO:316, and a second heavy chain having the sequence of SEQ ID NO:317.

[0289] The epitope recognized by clone 1C7 is advantageous relative to binding sites of benchmark antibodies as it recognizes truncated forms of Tau that are not recognized by antibodies directed against N-terminal or C-terminal epitopes.

[0290] 1H_G11

[0291] In some embodiments, an anti-Tau antibody comprises a heavy chain CDR1 sequence comprising the amino acid sequence of SEQ ID NO:22, a heavy chain CDR2 sequence comprising the amino acid sequence of SEQ ID NO:23, and a heavy chain CDR3 sequence comprising the amino acid sequence of SEQ ID NO:24. In some embodiments, an anti-Tau antibody comprises a light chain CDR1 sequence comprising the amino acid sequence of SEQ ID NO:42, a light chain CDR2 sequence comprising the amino acid sequence of SEQ ID NO:43, and a light chain CDR3 sequence comprising the amino acid sequence of SEQ ID NO:44. In some embodiments, an anti-Tau antibody comprises a heavy chain CDR1-3 and a light chain CDR1-3 comprising the amino acid sequences of SEQ ID NOS:22, 23, 24, 42, 43, and 44, respectively.

[0292] In some embodiments, an anti-Tau antibody comprises a heavy chain variable region comprising an amino acid sequence that has at least 90% sequence identity (e.g., at least 91%, at least 92%, at least 93%, at least 94%, at least 95%, at least 96%, at least 97%, at least 98%, or at least 99% sequence identity) to SEQ ID NO:40. In some embodiments, an anti-Tau antibody comprises a heavy chain variable region comprising the amino acid sequence of SEQ ID NO:40.

[0293] In some embodiments, an anti-Tau antibody comprises a light chain variable region comprising an amino acid sequence that has at least 90% sequence identity (e.g., at least 91%, at least 92%, at least 93%, at least 94%, at least 95%, at least 96%, at least 97%, at least 98%, or at least 99% sequence identity) to SEQ ID NO:41. In some embodiments, an anti-Tau antibody comprises a light chain variable region comprising the amino acid sequence of SEQ ID NO:41.

[0294] In some embodiments, an anti-Tau antibody comprises a heavy chain variable region comprising an amino acid sequence that has at least 90% sequence identity (e.g., at least 91%, at least 92%, at least 93%, at least 94%, at least 95%, at least 96%, at least 97%, at least 98%, or at least 99% sequence identity) to SEQ ID NO:40 and further comprises a light chain variable region comprising an amino acid sequence that has at least 90% sequence identity (e.g., at least 91%, at least 92%, at least 93%, at least 94%, at least 95%, at least 96%, at least 97%, at least 98%, or at least 99% sequence identity) to SEQ ID NO:41. In some embodiments, an anti-Tau antibody comprises a heavy chain variable region comprising the amino acid sequence of SEQ ID NO:40 and further comprises a light chain variable region comprising the amino acid sequence of SEQ ID NO:41.

[0295] In some embodiments, an anti-Tau antibody is an antibody that competes for binding with an antibody as described herein (e.g., an antibody comprising a heavy chain CDR1-3 and a light chain CDR1-3 comprising the amino acid sequences of SEQ ID NOS:22, 23, 24, 42, 43, and 44, respectively, or an antibody comprising a heavy chain variable region comprising the amino acid sequence of SEQ ID NO:40 and further comprising a light chain variable region comprising the amino acid sequence of SEQ ID NO:41).

[0296] 1H_B12

[0297] In some embodiments, an anti-Tau antibody comprises a heavy chain CDR1 sequence comprising the amino acid sequence of SEQ ID NO:22, a heavy chain CDR2 sequence comprising the amino acid sequence of SEQ ID NO:23, and a heavy chain CDR3 sequence comprising the amino acid sequence of SEQ ID NO:24. In some embodiments, an anti-Tau antibody comprises a light chain CDR1 sequence comprising the amino acid sequence of SEQ ID NO:42, a light chain CDR2 sequence comprising the amino acid sequence of SEQ ID NO:43, and a light chain CDR3 sequence comprising the amino acid sequence of SEQ ID NO:46. In some embodiments, an anti-Tau antibody comprises a heavy chain CDR1-3 and a light chain CDR1-3 comprising the amino acid sequences of SEQ ID NOS:22, 23, 24, 42, 43, and 46, respectively.

[0298] In some embodiments, an anti-Tau antibody comprises a heavy chain variable region comprising an amino acid sequence that has at least 90% sequence identity (e.g., at least 91%, at least 92%, at least 93%, at least 94%, at least 95%, at least 96%, at least 97%, at least 98%, or at least 99% sequence identity) to SEQ ID NO:40. In some embodiments, an anti-Tau antibody comprises a heavy chain variable region comprising the amino acid sequence of SEQ ID NO:40.

[0299] In some embodiments, an anti-Tau antibody comprises a light chain variable region comprising an amino acid sequence that has at least 90% sequence identity (e.g., at least 91%, at least 92%, at least 93%, at least 94%, at least 95%, at least 96%, at least 97%, at least 98%, or at least 99% sequence identity) to SEQ ID NO:45. In some embodiments, an anti-Tau antibody comprises a light chain variable region comprising the amino acid sequence of SEQ ID NO:45.

[0300] In some embodiments, an anti-Tau antibody comprises a heavy chain variable region comprising an amino acid sequence that has at least 90% sequence identity (e.g., at least 91%, at least 92%, at least 93%, at least 94%, at least 95%, at least 96%, at least 97%, at least 98%, or at least 99% sequence identity) to SEQ ID NO:40 and further comprises a light chain variable region comprising an amino acid sequence that has at least 90% sequence identity (e.g., at least 91%, at least 92%, at least 93%, at least 94%, at least 95%, at least 96%, at least 97%, at least 98%, or at least 99% sequence identity) to SEQ ID NO:45. In some embodiments, an anti-Tau antibody comprises a heavy chain variable region comprising the amino acid sequence of SEQ ID NO:40 and further comprises a light chain variable region comprising the amino acid sequence of SEQ ID NO:45.

[0301] In some embodiments, an anti-Tau antibody is an antibody that competes for binding with an antibody as described herein (e.g., an antibody comprising a heavy chain CDR1-3 and a light chain CDR1-3 comprising the amino acid sequences of SEQ ID NOS:22, 23, 24, 42, 43, and 46, respectively, or an antibody comprising a heavy chain variable region comprising the amino acid sequence of SEQ ID NO:40 and further comprising a light chain variable region comprising the amino acid sequence of SEQ ID NO:45).

Anti-Tau Antibodies that Recognize an Epitope within Residues 251-270 and/or Residues 346-360

[0302] In some embodiments, an anti-Tau antibody recognizes an epitope within residues 251-270 of SEQ ID NO:1 (e.g., an epitope within residues 256-270 of SEQ ID NO:1, or an epitope comprising the sequence SKIGS within residues 251-270) and/or recognizes an epitope within residues 346-360 (e.g., an epitope comprising the sequence SKIGS within residues 346-360). In some embodiments, an anti-Tau antibody recognizes both an epitope within residues 251-270 of SEQ ID NO: 1 (e.g., an epitope within residues 256-270 of SEQ ID NO: 1, or an epitope comprising the sequence SKIGS within residues 251-270) and an epitope within residues 346-360 (e.g., an epitope comprising the sequence SKIGS within residues 346-360). In some embodiments, the antibody further comprises one or more complementarity determining region (CDR), heavy chain variable region, and/or light chain variable regions as described herein (e.g., as described in the Sequence Listing).

[0303] In some embodiments, an anti-Tau antibody specifically binds to a peptide having the sequence PDLKNVKSKIGSTEN (SEQ ID NO:113), which corresponds to residues 251-265 of SEQ ID NO:1. In some embodiments, the peptide sequence set forth in SEQ ID NO:113 is sufficient for binding to the anti-Tau antibody. In some embodiments, the anti-Tau antibody further comprises one or more complementarity determining region (CDR), heavy chain variable region, and/or light chain variable region sequences as described herein (e.g., as described in the Sequence Listing).

[0304] In some embodiments, an anti-Tau antibody specifically binds to a peptide having the sequence VKSKIGSTENLKHQP (SEQ ID NO: 112), which corresponds to residues 256-270 of SEQ ID NO:1. In some embodiments, the peptide sequence set forth in SEQ ID NO:112 is sufficient for binding to the anti-Tau antibody. In some embodiments, the anti-Tau antibody further comprises one or more complementarity determining region (CDR), heavy chain variable region, and/or light chain variable region sequences as described herein (e.g., as described in the Sequence Listing).

[0305] In some embodiments, an anti-Tau antibody specifically binds to a peptide having the sequence FKDRVQSKIGSLDNI (SEQ ID NO: 117), which corresponds to residues 346-360 of SEQ ID NO:1. In some embodiments, the peptide sequence set forth in SEQ ID NO:117 is sufficient for binding to the anti-Tau antibody. In some embodiments, the anti-Tau antibody further comprises one or more complementarity determining region (CDR), heavy chain variable region, and/or light chain variable region sequences as described herein (e.g., as described in the Sequence Listing).

[0306] In some embodiments, an anti-Tau antibody comprises one or more CDRs selected from the group consisting of:
[0307] (a) a heavy chain CDR1 having at least 90% sequence identity to the amino acid sequence of any one of SEQ ID NOS:9, 17, and 47 or having up to two amino acid substitutions relative to the amino acid sequence of any one of SEQ ID NOS:9, 17, and 47;
[0308] (b) a heavy chain CDR2 having at least 90% sequence identity to the amino acid sequence of SEQ ID NO: 10 or having up to two amino acid substitutions relative to the amino acid sequence of SEQ ID NO: 10;
[0309] (c) a heavy chain CDR3 having at least 90% sequence identity to the amino acid sequence of any one of SEQ ID NOS:11, 18, 30, 33, and 48 or having up to two amino acid substitutions relative to the amino acid sequence of any one of SEQ ID NOS:11, 18, 30, 33, and 48;
[0310] (d) a light chain CDR1 having at least 90% sequence identity to the amino acid sequence of SEQ ID NO: 13 or having up to two amino acid substitutions relative to the amino acid sequence of SEQ ID NO: 13;
[0311] (e) a light chain CDR2 having at least 90% sequence identity to the amino acid sequence of SEQ ID NO: 14 or having up to two amino acid substitutions relative to the amino acid sequence of SEQ ID NO: 14; and
[0312] (f) a light chain CDR3 having at least 90% sequence identity to the amino acid sequence of any one of SEQ ID NOS:15, 20, and 49 or having up to two amino acid substitutions relative to the amino acid sequence of any one of SEQ ID NOS: 15, 20, and 49.

[0313] In some embodiments, an anti-Tau antibody comprises two, three, four, five, or all six of (a)-(f). In some embodiments, an anti-Tau antibody comprises the heavy chain CDR1 of (a), the heavy chain CDR2 of (b), and the heavy chain CDR3 of (c). In some embodiments, an anti-Tau antibody comprises the light chain CDR1 of (d), the light chain CDR2 of (e), and the light chain CDR3 of (f). In some embodiments, a CDR having up to two amino acid substitutions has one amino acid substitution relative to the reference sequence. In some embodiments, a CDR having up to two amino acid substitutions has two amino acid substitutions relative to the reference sequence. In some embodiments, the up to two amino acid substitutions are conservative substitutions.

[0314] In some embodiments, an anti-Tau antibody comprises one or more CDRs selected from the group consisting of:
[0315] (a) a heavy chain CDR1 comprising the amino acid sequence of any one of SEQ ID NOS:9, 17, and 47;
[0316] (b) a heavy chain CDR2 comprising the amino acid sequence of SEQ ID NO:10;
[0317] (c) a heavy chain CDR3 comprising the amino acid sequence of any one of SEQ ID NOS:11, 18, 30, 33, and 48;
[0318] (d) a light chain CDR1 comprising the amino acid sequence of SEQ ID NO: 13;
[0319] (e) a light chain CDR2 comprising the amino acid sequence of SEQ ID NO: 14; and
[0320] (f) a light chain CDR3 comprising the amino acid sequence of any one of SEQ ID NOS:15, 20, and 49.

[0321] In some embodiments, an anti-Tau antibody comprises two, three, four, five, or all six of (a)-(f). In some embodiments, an anti-Tau antibody comprises the heavy chain CDR1 of (a), the heavy chain CDR2 of (b), and the heavy chain CDR3 of (c). In some embodiments, an anti-Tau antibody comprises the light chain CDR1 of (d), the light chain CDR2 of (e), and the light chain CDR3 of (f).

[0322] In some embodiments, an anti-Tau antibody comprises one or more consensus sequences. In some embodiments, one or more consensus sequences can be identified for antibodies that recognize the same or similar epitope or epitopes as 1A1. Exemplary 1A1-like consensus sequences include SEQ ID NO:47, SEQ ID NO:48, and SEQ ID NO:49. In the consensus sequences of SEQ ID NOS:47-49, the capitalized letter represents an amino acid residue that is absolutely conserved among the aligned sequences (e.g., aligned CDR sequences), while “x” represents an amino acid residue that is not absolutely conserved among the aligned sequences. It will be appreciated that when selecting an amino acid to insert at a position marked by an “x” that in some embodiments, the amino acid is selected from those amino acids found at the corresponding position in the aligned sequences.

[0323] In some embodiments, the antibody comprises a heavy chain CDR1 sequence having the consensus sequence GFNIKDSLxH (SEQ ID NO:47). In some embodiments, the heavy chain CDR1 consensus sequence comprises a methionine (M) or isoleucine (I) amino acid at the variable residue (“x”).

[0324] In some embodiments, the antibody comprises a heavy chain CDR3 sequence having the consensus sequence xRRDWEGP (SEQ ID NO:48). In some embodiments, the heavy chain CDR3 consensus sequence comprises an alanine (A) or threonine (T) amino acid at the variable residue (“x”).

[0325] In some embodiments, the antibody comprises a light chain CDR3 sequence having the consensus sequence VQGTHFPxT (SEQ ID NO:49). In some embodiments, the light chain CDR3 consensus sequence comprises a phenylalanine (F) or tyrosine (Y) amino acid at the variable (“x”) residue.

[0326] In some embodiments, an anti-Tau antibody binds to at least one of the following residues P251, D252, L253, K254, N255, V256, K257, S258, K259, I260, G261, S262, T263, E264, N265, L266, K267, H268, Q269, or P270 of SEQ ID NO: 1. In some embodiments, an anti-Tau antibody binds to at least one of the following residues F346, K347, D348, R349, V350, Q351, S352, K353, I354, G355, S356, L357, D358, N359, or 1360 of SEQ ID NO:1. In some embodiments, an anti-Tau antibody binds to at least one of the following residues P251, D252, L253, K254, N255, V256, K257, S258, K259, I260, G261, S262, T263, E264, N265, L266, K267, H268, Q269, or P270 of SEQ ID NO:1 and at least one of the following residues F346, K347, D348, R349, V350, Q351, S352, K353, I354, G355, S356, L357, D358, N359, or 1360 of SEQ ID NO: 1.

[0327] In some embodiments, an anti-Tau antibody binds to at least two, three, four, five, six, seven, eight, nine, ten, eleven, twelve, thirteen, fourteen, fifteen, sixteen, seventeen, eighteen, nineteen, or all twenty of the following residues P251, D252, L253, K254, N255, V256, K257, S258, K259, I260, G261, S262, T263, E264, N265, L266, K267, H268, Q269, or P270 of SEQ ID NO: 1. In some embodiments, an anti-Tau antibody binds to at least two, three, four, five, six, seven, eight, nine, ten, eleven, twelve, thirteen, fourteen, or all fifteen of the following residues F346, K347, D348, R349, V350, Q351, S352, K353, I354, G355, S356, L357, D358, N359, or 1360 of SEQ ID NO:1. In some embodiments, an anti-Tau antibody binds to at least two, three, four, five, six, seven, eight, nine, ten, eleven, twelve, thirteen, fourteen, fifteen, sixteen, seventeen, eighteen, nineteen, or all twenty of the following residues P251, D252, L253, K254, N255, V256, K257, S258, K259, I260, G261, S262, T263, E264, N265, L266, K267, H268, Q269, or P270 of SEQ ID NO:1 and at least two, three, four, five, six, seven, eight, nine, ten, eleven, twelve, thirteen, fourteen, or all fifteen of the following residues F346, K347, D348, R349, V350, Q351, S352, K353, I354, G355, S356, L357, D358, N359, or I360 of SEQ ID NO:1.

[0328] In some embodiments, the anti-Tau antibody binds to contiguous residues of SEQ ID NO: 1 (e.g., two or more residues within residues 251-270 of SEQ ID NO: 1 or two or more residues within residues 346-360 of SEQ ID NO: 1). In some embodiments, the anti-Tau antibody binds to non-contiguous residues of SEQ ID NO:1 (e.g., one or more residues within residues 251-270 of SEQ ID NO:1 and/or one or more residues within residues 346-360 of SEQ ID NO:1). In some embodiments, the anti-Tau antibody binds to both contiguous and non-contiguous residues of SEQ ID NO: 1.

[0329] In some embodiments, an anti-Tau antibody binds to at least residue P251 of SEQ ID NO:1. In some embodiments, an anti-Tau antibody binds to at least residue D252 of SEQ ID NO: 1. In some embodiments, an anti-Tau antibody binds to at least residue L253 of SEQ ID NO: 1. In some embodiments, an anti-Tau antibody binds to at least residue K254 of SEQ ID NO:1. In some embodiments, an anti-Tau antibody binds to at least residue N255 of SEQ ID NO: 1. In some embodiments, an anti-Tau antibody binds to at least residue V256 of SEQ ID NO:1. In some embodiments, an anti-Tau antibody binds to at least residue K257 of SEQ ID NO:1. In some embodiments, an anti-Tau antibody binds to at least residue S258 of SEQ ID NO:1. In some embodiments, an anti-Tau antibody binds to at least residue K259 of SEQ ID NO:1. In some embodiments, an anti-Tau antibody binds to at least residue I260 of SEQ ID NO:1. In some embodiments, an anti-Tau antibody binds to at least residue G261 of SEQ ID NO:1. In some embodiments, an anti-Tau antibody binds to at least residue S262 of SEQ ID NO:1. In some embodiments, an anti-Tau antibody binds to at least residue T263 of SEQ ID NO: 1. In some embodiments, an anti-Tau antibody binds to at least residue E264 of SEQ ID NO: 1. In some embodiments, an anti-Tau antibody binds to at least residue N265 of SEQ ID NO:1. In some embodiments, an anti-Tau antibody binds to at least residue L266 of SEQ ID NO: 1. In some embodiments, an anti-Tau antibody binds to at least residue K267 of SEQ ID NO:1. In some embodiments, an anti-Tau antibody binds to at least residue H268 of SEQ ID NO:1. In some embodiments, an anti-Tau antibody binds to at least residue Q269 of SEQ ID NO:1. In some embodiments, an anti-Tau antibody binds to at least residue P270 of SEQ ID NO: 1.

[0330] In some embodiments, an anti-Tau antibody binds to at least residue F346 of SEQ ID NO:1. In some embodiments, an anti-Tau antibody binds to at least residue K347 of SEQ ID NO:1. In some embodiments, an anti-Tau antibody binds to at least residue D348 of SEQ ID NO: 1. In some embodiments, an anti-Tau antibody binds to at least residue R349 of SEQ ID NO: 1. In some embodiments, an anti-Tau antibody binds to at least residue V350 of SEQ ID NO:1. In some embodiments, an anti-Tau antibody binds to at least residue Q351 of SEQ ID NO: 1. In some embodiments, an anti-Tau antibody binds to at least residue S352 of SEQ ID NO:1. In some embodiments, an anti-Tau antibody binds to at least residue K353 of SEQ ID NO:1. In some embodiments, an anti-Tau antibody binds to at least residue I354 of SEQ ID NO:1. In some embodiments, an anti-Tau antibody binds to at least residue G355 of SEQ ID NO:1. In some embodiments, an anti-Tau antibody binds to at least residue S356 of SEQ ID NO:1. In some embodiments, an anti-Tau antibody binds to at least residue L357 of SEQ ID NO:1. In some embodiments, an anti-Tau antibody binds to at least residue D358 of SEQ ID NO:1. In some embodiments, an anti-Tau antibody binds to at least residue N359 of SEQ ID NO:1. In some embodiments, an anti-Tau antibody binds to at least residue 1360 of SEQ ID NO: 1.

[0331] In some embodiments, an anti-Tau antibody that recognizes an epitope within residues 251-270 of SEQ ID NO:1 and/or an epitope within residues 346-360 of SEQ ID NO:1 prevents, reduces, or inhibits pathological Tau seeding and/or spreading, e.g., by at least 10%, 15%, 20%, 25%, 30%, 35%, 40%, 45%, 50%, 55%, 60%, 65%, 70%, 75%, 80%, 85%, 90%, or 95% (e.g., compared to the amount of pathological Tau seeding and/or spreading in the absence of the anti-Tau antibody). In some embodiments, an anti-Tau antibody that recognizes an epitope within residues 251-270 of SEQ ID NO:1 and/or an epitope within residues 346-360 of SEQ ID NO:1 prevents, reduces, or inhibits Tau oligomerization, e.g., by at least 10%, 15%, 20%, 25%, 30%, 35%, 40%, 45%, 50%, 55%, 60%, 65%, 70%, 75%, 80%, 85%, 90%, or 95% (e.g., compared to the amount of Tau oligomerization in the absence of the anti-Tau antibody). In some embodiments, an anti-Tau antibody that recognizes an epitope within residues 251-270 of SEQ ID NO:1 and/or an epitope within residues 346-360 of SEQ ID NO:1 prevents, reduces, or inhibits Tau aggregation, e.g., by at least 10%, 15%, 20%, 25%, 30%, 35%, 40%, 45%, 50%, 55%, 60%, 65%, 70%, 75%, 80%, 85%, 90%, or 95% (e.g., compared to the amount of Tau aggregation in the absence of the anti-Tau antibody). In some embodiments, an anti-Tau antibody that recognizes an epitope within residues 251-270 of SEQ ID NO:1 and/or an epitope within residues 346-360 of SEQ ID NO:1 prevents, reduces, or inhibits the binding of another anti-Tau antibody, e.g., by at least 10%, 15%, 20%, 25%, 30%, 35%, 40%, 45%, 50%, 55%, 60%, 65%, 70%, 75%, 80%, 85%, 90%, or 95% (e.g., compared to antibody binding in the absence of the anti-Tau antibody that recognizes an epitope within residues 251-270 of SEQ ID NO: 1 and/or an epitope within residues 346-360 of SEQ ID NO: 1). Methods for measuring Tau seeding, spreading, oligomerization, and/or aggregation are known in the art. A specific example of one such method for measuring Tau seeding and/or aggregation is described in Example 2.

[0332] 1A1

[0333] In some embodiments, an anti-Tau antibody comprises a heavy chain CDR1 sequence comprising the amino acid sequence of SEQ ID NO:9, a heavy chain CDR2 sequence comprising the amino acid sequence of SEQ ID NO:10, and a heavy chain CDR3 sequence comprising the amino acid sequence of SEQ ID NO:11. In some embodiments, an anti-Tau antibody comprises a light chain CDR1 sequence comprising the amino acid sequence of SEQ ID NO: 13, a light chain CDR2 sequence comprising the amino acid sequence of SEQ ID NO: 14, and a light chain CDR3 sequence comprising the amino acid sequence of SEQ ID NO: 15. In some embodiments, an anti-Tau antibody comprises a heavy chain CDR1-3 and a light chain CDR1-3 comprising the amino acid sequences of SEQ ID NOS:9, 10, 11, 13, 14, and 15, respectively.

[0334] In some embodiments, an anti-Tau antibody comprises a heavy chain variable region comprising an amino acid sequence that has at least 90% sequence identity (e.g., at least 91%, at least 92%, at least 93%, at least 94%, at least 95%, at least 96%, at least 97%, at least 98%, or at least 99% sequence identity) to SEQ ID NO:8. In some embodiments, an anti-Tau antibody comprises a heavy chain variable region comprising the amino acid sequence of SEQ ID NO:8.

[0335] In some embodiments, an anti-Tau antibody comprises a light chain variable region comprising an amino acid sequence that has at least 90% sequence identity (e.g., at least 91%, at least 92%, at least 93%, at least 94%, at least 95%, at least 96%, at least 97%, at least 98%, or at least 99% sequence identity) to SEQ ID NO:12. In some embodiments, an anti-Tau antibody comprises a light chain variable region comprising the amino acid sequence of SEQ ID NO:12.

[0336] In some embodiments, an anti-Tau antibody comprises a heavy chain variable region comprising an amino acid sequence that has at least 90% sequence identity (e.g., at least 91%, at least 92%, at least 93%, at least 94%, at least 95%, at least 96%, at least 97%, at least 98%, or at least 99% sequence identity) to SEQ ID NO:8 and further comprises a light chain variable region comprising an amino acid sequence that has at least 90% sequence identity (e.g., at least 91%, at least 92%, at least 93%, at least 94%, at least 95%, at least 96%, at least 97%, at least 98%, or at least 99% sequence identity) to SEQ ID NO:12. In some embodiments, an anti-Tau antibody comprises a heavy chain variable region comprising the amino acid sequence of SEQ ID NO:8 and further comprises a light chain variable region comprising the amino acid sequence of SEQ ID NO:12.

[0337] In some embodiments, an anti-Tau antibody is an antibody that competes for binding with an antibody as described herein (e.g., an antibody comprising a heavy chain CDR1-3 and a light chain CDR1-3 comprising the amino acid sequences of SEQ ID NOS:9, 10, 11, 13, 14, and 15, respectively, or an antibody comprising a heavy chain variable region comprising the amino acid sequence of SEQ ID NO:8 and further comprising a light chain variable region comprising the amino acid sequence of SEQ ID NO: 12).

[0338] In some embodiments, the anti-Tau antibody having one or more CDR sequences, heavy chain variable region sequences, and/or light chain variable region sequences as described herein recognizes an unphosphorylated epitope within residues 251-270 of SEQ ID NO:1. In some embodiments, the antibody recognizes a phosphorylated epitope within residues 251-270 of SEQ ID NO: 1. In some embodiments, the antibody recognizes a phosphorylated epitope within residues 251-270 of SEQ ID NO:1 that is phosphorylated at residue Ser258. In some embodiments, the antibody recognizes a phosphorylated epitope within residues 251-270 of SEQ ID NO:1 that is phosphorylated at residue Ser262. In some embodiments, the antibody recognizes a phosphorylated epitope within residues 251-270 of SEQ ID NO: 1 that is phosphorylated at both residue Ser258 and residue Ser262.

[0339] In some embodiments, the anti-Tau antibody having one or more CDR sequences, heavy chain variable region sequences, and/or light chain variable region sequences as described herein recognizes an unphosphorylated epitope within residues 346-360 epitope of SEQ ID NO:1. In some embodiments, the antibody recognizes a phosphorylated epitope within residues 346-360 of SEQ ID NO: 1. In some embodiments, the antibody recognizes a phosphorylated epitope within residues 346-360 of SEQ ID NO:1 that is phosphorylated at residue Ser352. In some embodiments, the antibody recognizes a phosphorylated epitope within residues 346-360 of SEQ ID NO:1 that is phosphorylated at residue Ser356. In some embodiments, the antibody does not recognize a phosphorylated epitope within residues 346-360 of SEQ ID NO:1 that is phosphorylated at both residue Ser352 and residue Ser356.

[0340] 1A5

[0341] In some embodiments, an anti-Tau antibody comprises a heavy chain CDR1 sequence comprising the amino acid sequence of SEQ ID NO: 17, a heavy chain CDR2 sequence comprising the amino acid sequence of SEQ ID NO:10, and a heavy chain CDR3 sequence comprising the amino acid sequence of SEQ ID NO: 18. In some embodiments, an anti-Tau antibody comprises a light chain CDR1 sequence comprising the amino acid sequence of SEQ ID NO: 13, a light chain CDR2 sequence comprising the amino acid sequence of SEQ ID NO: 14, and a light chain CDR3 sequence comprising the amino acid sequence of SEQ ID NO:20. In some embodiments, an anti-Tau antibody comprises a heavy chain CDR1-3 and a light chain CDR1-3 comprising the amino acid sequences of SEQ ID NOS:17, 10, 18, 13, 14, and 20, respectively.

[0342] In some embodiments, an anti-Tau antibody comprises a heavy chain variable region comprising an amino acid sequence that has at least 90% sequence identity (e.g., at least 91%, at least 92%, at least 93%, at least 94%, at least 95%, at least 96%, at least 97%, at least 98%, or at least 99% sequence identity) to SEQ ID NO:16. In some embodiments, an anti-Tau antibody comprises a heavy chain variable region comprising the amino acid sequence of SEQ ID NO: 16.

[0343] In some embodiments, an anti-Tau antibody comprises a light chain variable region comprising an amino acid sequence that has at least 90% sequence identity (e.g., at least 91%, at least 92%, at least 93%, at least 94%, at least 95%, at least 96%, at least 97%, at least 98%, or at least 99% sequence identity) to SEQ ID NO:19. In some embodiments, an anti-Tau antibody comprises a light chain variable region comprising the amino acid sequence of SEQ ID NO:19.

[0344] In some embodiments, an anti-Tau antibody comprises a heavy chain variable region comprising an amino acid sequence that has at least 90% sequence identity (e.g., at least 91%, at least 92%, at least 93%, at least 94%, at least 95%, at least 96%, at least 97%, at least 98%, or at least 99% sequence identity) to SEQ ID NO: 16 and further comprises a light chain variable region comprising an amino acid sequence that has at least 90% sequence identity (e.g., at least 91%, at least 92%, at least 93%, at least 94%, at least 95%, at least 96%, at least 97%, at least 98%, or at least 99% sequence identity) to SEQ ID NO:19. In some embodiments, an anti-Tau antibody comprises a heavy chain variable region comprising the amino acid sequence of SEQ ID NO: 16 and further comprises a light chain variable region comprising the amino acid sequence of SEQ ID NO: 19.

[0345] In some embodiments, an anti-Tau antibody is an antibody that competes for binding with an antibody as described herein (e.g., an antibody comprising a heavy chain CDR1-3 and a light chain CDR1-3 comprising the amino acid sequences of SEQ ID NOS:17, 10, 18, 13, 14, and 20, respectively, or an antibody comprising a heavy chain variable region comprising the amino acid sequence of SEQ ID NO: 16 and further comprising a light chain variable region comprising the amino acid sequence of SEQ ID NO: 19).

[0346] In some embodiments, the anti-Tau antibody having one or more CDR sequences, heavy chain variable region sequences, and/or light chain variable region sequences as described herein recognizes an unphosphorylated epitope within residues 251-270 of SEQ ID NO:1. In some embodiments, the antibody recognizes a phosphorylated epitope within residues 251-270 of SEQ ID NO: 1. In some embodiments, the antibody recognizes a phosphorylated epitope within residues 251-270 of SEQ ID NO:1 that is phosphorylated at residue Ser258. In some embodiments, the antibody does not recognize a phosphorylated epitope within residues 251-270 of SEQ ID NO: 1 that is phosphorylated at residue Ser262 or that is phosphorylated at both residue Ser258 and residue Ser262.

[0347] In some embodiments, the anti-Tau antibody having one or more CDR sequences, heavy chain variable region sequences, and/or light chain variable region sequences as described herein recognizes an unphosphorylated epitope within residues 346-360 of SEQ ID NO:1. In some embodiments, the antibody does not recognize a phosphorylated epitope within residues 346-360 of SEQ ID NO:1.

[0348] 1D10

[0349] In some embodiments, an anti-Tau antibody comprises a heavy chain CDR1 sequence comprising the amino acid sequence of SEQ ID NO:9, a heavy chain CDR2 sequence comprising the amino acid sequence of SEQ ID NO:10, and a heavy chain CDR3 sequence comprising the amino acid sequence of SEQ ID NO:30. In some embodiments, an anti-Tau antibody comprises a light chain CDR1 sequence comprising the amino acid sequence of SEQ ID NO: 13, a light chain CDR2 sequence comprising the amino acid sequence of SEQ ID NO: 14, and a light chain CDR3 sequence comprising the amino acid sequence of SEQ ID NO:20. In some embodiments, an anti-Tau antibody comprises a heavy chain CDR1-3 and a light chain CDR1-3 comprising the amino acid sequences of SEQ ID NOS:9, 10, 30, 13, 14, and 20, respectively.

[0350] In some embodiments, an anti-Tau antibody comprises a heavy chain variable region comprising an amino acid sequence that has at least 90% sequence identity (e.g., at least 91%, at least 92%, at least 93%, at least 94%, at least 95%, at least 96%, at least 97%, at least 98%, or at least 99% sequence identity) to SEQ ID NO:29. In some embodiments, an anti-Tau antibody comprises a heavy chain variable region comprising the amino acid sequence of SEQ ID NO:29.

[0351] In some embodiments, an anti-Tau antibody comprises a light chain variable region comprising an amino acid sequence that has at least 90% sequence identity (e.g., at least 91%, at least 92%, at least 93%, at least 94%, at least 95%, at least 96%, at least 97%, at least 98%, or at least 99% sequence identity) to SEQ ID NO:31. In some embodiments, an anti-Tau antibody comprises a light chain variable region comprising the amino acid sequence of SEQ ID NO:31.

[0352] In some embodiments, an anti-Tau antibody comprises a heavy chain variable region comprising an amino acid sequence that has at least 90% sequence identity (e.g., at least 91%, at least 92%, at least 93%, at least 94%, at least 95%, at least 96%, at least 97%, at least 98%, or at least 99% sequence identity) to SEQ ID NO:29 and further comprises a light chain variable region comprising an amino acid sequence that has at least 90% sequence identity (e.g., at least 91%, at least 92%, at least 93%, at least 94%, at least 95%, at least 96%, at least 97%, at least 98%, or at least 99% sequence identity) to SEQ ID NO:31. In some embodiments, an anti-Tau antibody comprises a heavy chain variable region comprising the amino acid sequence of SEQ ID NO:29 and further comprises a light chain variable region comprising the amino acid sequence of SEQ ID NO:31.

[0353] In some embodiments, an anti-Tau antibody is an antibody that competes for binding with an antibody as described herein (e.g., an antibody comprising a heavy chain CDR1-3 and a light chain CDR1-3 comprising the amino acid sequences of SEQ ID NOS:9, 10, 30, 13, 14, and 20, respectively, or an antibody comprising a heavy chain variable region comprising the amino acid sequence of SEQ ID NO:29 and further comprising a light chain variable region comprising the amino acid sequence of SEQ ID NO:31).

[0354] In some embodiments, the anti-Tau antibody having one or more CDR sequences, heavy chain variable region sequences, and/or light chain variable region sequences as described herein recognizes an unphosphorylated epitope within residues 251-270 of SEQ ID NO:1. In some embodiments, the antibody recognizes a phosphorylated epitope within residues 251-270 of SEQ ID NO: 1. In some embodiments, the antibody recognizes a phosphorylated epitope within residues 251-270 of SEQ ID NO:1 that is phosphorylated at residue Ser258. In some embodiments, the antibody recognizes a phosphorylated epitope within residues 251-270 of SEQ ID NO:1 that is phosphorylated at residue Ser262. In some embodiments, the antibody does not recognize a phosphorylated epitope within residues 251-270 that is phosphorylated at both residue Ser258 and residue Ser262.

[0355] In some embodiments, the anti-Tau antibody having one or more CDR sequences, heavy chain variable region sequences, and/or light chain variable region sequences as described herein recognizes an unphosphorylated epitope within residues 346-360 of SEQ ID NO:1. In some embodiments, the antibody does not recognize a phosphorylated epitope within residues 346-360 of SEQ ID NO:1.

[0356] 1G7

[0357] In some embodiments, an anti-Tau antibody comprises a heavy chain CDR1 sequence comprising the amino acid sequence of SEQ ID NO:9, a heavy chain CDR2 sequence comprising the amino acid sequence of SEQ ID NO:10, and a heavy chain CDR3 sequence comprising the amino acid sequence of SEQ ID NO:33. In some embodiments, an anti-Tau antibody comprises a light chain CDR1 sequence comprising the amino acid sequence of SEQ ID NO: 13, a light chain CDR2 sequence comprising the amino acid sequence of SEQ ID NO: 14, and a light chain CDR3 sequence comprising the amino acid sequence of SEQ ID NO:20. In some embodiments, an anti-Tau antibody comprises a heavy chain CDR1-3 and a light chain CDR1-3 comprising the amino acid sequences of SEQ ID NOS:9, 10, 33, 13, 14, and 20, respectively.

[0358] In some embodiments, an anti-Tau antibody comprises a heavy chain variable region comprising an amino acid sequence that has at least 90% sequence identity (e.g., at least 91%, at least 92%, at least 93%, at least 94%, at least 95%, at least 96%, at least 97%, at least 98%, or at least 99% sequence identity) to SEQ ID NO:32. In some embodiments, an anti-Tau antibody comprises a heavy chain variable region comprising the amino acid sequence of SEQ ID NO:32.

[0359] In some embodiments, an anti-Tau antibody comprises a light chain variable region comprising an amino acid sequence that has at least 90% sequence identity (e.g., at least 91%, at least 92%, at least 93%, at least 94%, at least 95%, at least 96%, at least 97%, at least 98%, or at least 99% sequence identity) to SEQ ID NO:34. In some embodiments, an anti-Tau antibody comprises a light chain variable region comprising the amino acid sequence of SEQ ID NO:34.

[0360] In some embodiments, an anti-Tau antibody comprises a heavy chain variable region comprising an amino acid sequence that has at least 90% sequence identity (e.g., at least 91%, at least 92%, at least 93%, at least 94%, at least 95%, at least 96%, at least 97%, at least 98%, or at least 99% sequence identity) to SEQ ID NO:32 and further comprises a light chain variable region comprising an amino acid sequence that has at least 90% sequence identity (e.g., at least 91%, at least 92%, at least 93%, at least 94%, at least 95%, at least 96%, at least 97%, at least 98%, or at least 99% sequence identity) to SEQ ID NO:34. In some embodiments, an anti-Tau antibody comprises a heavy chain variable region comprising the amino acid sequence of SEQ ID NO:32 and further comprises a light chain variable region comprising the amino acid sequence of SEQ ID NO:34.

[0361] In some embodiments, an anti-Tau antibody is an antibody that competes for binding with an antibody as described herein (e.g., an antibody comprising a heavy chain CDR1-3 and a light chain CDR1-3 comprising the amino acid sequences of SEQ ID NOS:9, 10, 33, 13, 14, and 20, respectively, or an antibody comprising a heavy chain variable region comprising the amino acid sequence of SEQ ID NO:32 and further comprising a light chain variable region comprising the amino acid sequence of SEQ ID NO:34).

[0362] In some embodiments, the anti-Tau antibody having one or more CDR sequences, heavy chain variable region sequences, and/or light chain variable region sequences as described herein recognizes an unphosphorylated epitope within residues 251-270 of SEQ ID NO:1. In some embodiments, the antibody recognizes a phosphorylated epitope within residues 251-270 of SEQ ID NO: 1. In some embodiments, the antibody recognizes a phosphorylated epitope within residues 251-270 of SEQ ID NO:1 that is phosphorylated at residue Ser258. In some embodiments, the antibody does not recognize a phosphorylated epitope within residues 251-270 of SEQ ID NO: 1 that is phosphorylated at residue Ser262 or that is phosphorylated at both residue Ser258 and residue Ser262.

[0363] In some embodiments, the anti-Tau antibody having one or more CDR sequences, heavy chain variable region sequences, and/or light chain variable region sequences as described herein recognizes an unphosphorylated epitope within residues 346-360 of SEQ ID NO:1. In some embodiments, the antibody recognizes a phosphorylated epitope within residues 346-360 of SEQ ID NO: 1. In some embodiments, the antibody recognizes a phosphorylated epitope within residues 346-360 of SEQ ID NO:1 that is phosphorylated at residue Ser352. In some embodiments, the antibody does not recognize a phosphorylated epitope within residues 346-360 of SEQ ID NO:1 that is phosphorylated at residue Ser356 or that is phosphorylated at both residue Ser352 and residue Ser356.

Anti-Tau Antibodies that Recognize an Epitope within Residues 186-205

[0364] In some embodiments, an anti-Tau antibody recognizes an epitope within residues 186-205 of SEQ ID NO: 1 (e.g., an epitope comprising at least 6 contiguous amino acids within residues 186-205), or recognizes an epitope comprising or consisting of residues 186-205 of SEQ ID NO: 1. In some embodiments, the anti-Tau antibody further comprises one or more complementarity determining region (CDR), heavy chain variable region, and/or light chain variable region sequences as described herein (e.g., as described in the Sequence Listing).

[0365] In some embodiments, an anti-Tau antibody specifically binds to a peptide having the sequence GEPPKSGDRSGYSSPGSPGT (SEQ ID NO:178), which corresponds to residues 186-205 of SEQ ID NO:1. In some embodiments, the peptide sequence set forth in SEQ ID NO:178 is sufficient for binding to the anti-Tau antibody. In some embodiments, the anti-Tau antibody further comprises one or more complementarity determining region (CDR), heavy chain variable region, and/or light chain variable region sequences as described herein (e.g., as described in the Sequence Listing).

[0366] In some embodiments, an anti-Tau antibody comprises one or more CDRs selected from the group consisting of:
[0367] (a) a heavy chain CDR1 having at least 90% sequence identity to the amino acid sequence of SEQ ID NO: 168 or having up to two amino acid substitutions relative to the amino acid sequence of SEQ ID NO:168;
[0368] (b) a heavy chain CDR2 having at least 90% sequence identity to the amino acid sequence of SEQ ID NO: 169 or having up to two amino acid substitutions relative to the amino acid sequence of SEQ ID NO:169;
[0369] (c) a heavy chain CDR3 having at least 90% sequence identity to the amino acid sequence of SEQ ID NO:170 or having up to two amino acid substitutions relative to the amino acid sequence of SEQ ID NO:170;
[0370] (d) a light chain CDR1 having at least 90% sequence identity to the amino acid sequence of SEQ ID NO: 172 or having up to two amino acid substitutions relative to the amino acid sequence of SEQ ID NO: 172;
[0371] (e) a light chain CDR2 having at least 90% sequence identity to the amino acid sequence of SEQ ID NO: 173 or having up to two amino acid substitutions relative to the amino acid sequence of SEQ ID NO: 173; and
[0372] (f) a light chain CDR3 having at least 90% sequence identity to the amino acid sequence of SEQ ID NO: 174 or having up to two amino acid substitutions relative to the amino acid sequence of SEQ ID NO: 174.

[0373] In some embodiments, an anti-Tau antibody comprises two, three, four, five, or all six of (a)-(f). In some embodiments, an anti-Tau antibody comprises the heavy chain CDR1 of (a), the heavy chain CDR2 of (b), and the heavy chain CDR3 of (c). In some embodiments, an anti-Tau antibody comprises the light chain CDR1 of (d), the light chain CDR2 of (e), and the light chain CDR3 of (f). In some embodiments, a CDR having up to two amino acid substitutions has one amino acid substitution relative to the reference sequence. In some embodiments, a CDR having up to two amino acid substitutions has two amino acid substitutions relative to the reference sequence. In some embodiments, the up to two amino acid substitutions are conservative substitutions.

[0374] In some embodiments, an anti-Tau antibody comprises one or more CDRs selected from the group consisting of:
[0375] (a) a heavy chain CDR1 comprising the amino acid sequence of SEQ ID NO:168;
[0376] (b) a heavy chain CDR2 comprising the amino acid sequence of SEQ ID NO:169;
[0377] (c) a heavy chain CDR3 comprising the amino acid sequence of SEQ ID NOS: 170;
[0378] (d) a light chain CDR1 comprising the amino acid sequence of SEQ ID NO:172;
[0379] (e) a light chain CDR2 comprising the amino acid sequence of SEQ ID NO:173; and
[0380] (f) a light chain CDR3 comprising the amino acid sequence of SEQ ID NO:174.

[0381] In some embodiments, an anti-Tau antibody comprises two, three, four, five, or all six of (a)-(f). In some embodiments, an anti-Tau antibody comprises the heavy chain CDR1 of (a), the heavy chain CDR2 of (b), and the heavy chain CDR3 of (c). In some embodiments, an anti-Tau antibody comprises the light chain CDR1 of (d), the light chain CDR2 of (e), and the light chain CDR3 of (f).

[0382] In some embodiments, an anti-Tau antibody comprises one or more consensus sequences. Consensus sequences can be identified by aligning heavy chain or light chain sequences (e.g., CDRs) for antibodies that bind to the same or similar (e.g., overlapping) epitopes to determine conserved amino acids or motifs (i.e., where alteration in sequences may alter protein function) and regions where variation occurs in alignment of sequences (i.e., where variation of sequence is not likely to significantly affect protein function). In some embodiments, one or more consensus sequences can be identified for antibodies that recognize the same or similar epitope as 17G2.A1.

[0383] In some embodiments, an anti-Tau antibody binds to at least one of the following residues G186, E187, P188, P189, K190, S191, G192, D193, R194, S195, G196, Y197, S198, S199, P200, G201, S202, P203, G204, or T205 of SEQ ID NO: 1. In some embodiments, an anti-Tau antibody binds to at least two, three, four, five, six, seven, eight, nine, ten, eleven, twelve, thirteen, fourteen, fifteen, sixteen, seventeen, eighteen, nineteen, or all twenty of the following residues G186, E187, P188, P189, K190, S191, G192, D193, R194, S195, G196, Y197, S198, S199, P200, G201, S202, P203, G204, or T205 of SEQ ID NO:1. In some embodiments, the anti-Tau antibody binds to contiguous residues of SEQ ID NO: 1. In some embodiments, the anti-Tau antibody binds to non-contiguous residues of SEQ ID NO: 1. In some embodiments, the anti-Tau antibody binds to both contiguous and non-contiguous residues of SEQ ID NO: 1.

[0384] In some embodiments, an anti-Tau antibody binds to at least residue G186 of SEQ ID NO: 1. In some embodiments, an anti-Tau antibody binds to at least residue E187 of SEQ ID NO: 1. In some embodiments, an anti-Tau antibody binds to at least residue P188 of SEQ ID NO:1. In some embodiments, an anti-Tau antibody binds to at least residue P189 of SEQ ID NO: 1. In some embodiments, an anti-Tau antibody binds to at least residue K190 of SEQ ID NO:1. In some embodiments, an anti-Tau antibody binds to at least residue S191 of SEQ ID NO:1. In some embodiments, an anti-Tau antibody binds to at least residue G192 of SEQ ID NO:1. In some embodiments, an anti-Tau antibody binds to at least residue D193 of SEQ ID NO:1. In some embodiments, an anti-Tau antibody binds to at least residue R194 of SEQ ID NO:1. In some embodiments, an anti-Tau antibody binds to at least residue S195 of SEQ ID NO:1. In some embodiments, an anti-Tau antibody binds to at least residue G196 of SEQ ID NO:1. In some embodiments, an anti-Tau antibody binds to at least residue Y197 of SEQ ID NO:1. In some embodiments, an anti-Tau antibody binds to at least residue S198 of SEQ ID NO:1. In some embodiments, an anti-Tau antibody binds to at least residue S199 of SEQ ID NO:1. In some embodiments, an anti-Tau antibody binds to at least residue P200 of SEQ ID NO:1. In some embodiments, an anti-Tau antibody binds to at least residue G201 of SEQ ID NO:1. In some embodiments, an anti-Tau antibody binds to at least residue S202 of SEQ ID NO:1. In some embodiments, an anti-Tau antibody binds to at least residue P203 of SEQ ID NO:1. In some embodiments, an anti-Tau antibody binds to at least residue G204 of SEQ ID NO:1. In some embodiments, an anti-Tau antibody binds to at least residue T205 of SEQ ID NO: 1.

[0385] In some embodiments, an anti-Tau antibody that recognizes an epitope within residues 186-205 of SEQ ID NO: 1 prevents, reduces, or inhibits pathological Tau seeding and/or spreading, e.g., by at least 10%, 15%, 20%, 25%, 30%, 35%, 40%, 45%, 50%, 55%, 60%, 65%, 70%, 75%, 80%, 85%, 90%, or 95% (e.g., compared to the amount of pathological Tau seeding and/or spreading in the absence of the anti-Tau antibody). In some embodiments, an anti-Tau antibody that recognizes an epitope within residues 186-205 of SEQ ID NO:1 prevents, reduces, or inhibits Tau oligomerization, e.g., by at least 10%, 15%, 20%, 25%, 30%, 35%, 40%, 45%, 50%, 55%, 60%, 65%, 70%, 75%, 80%, 85%, 90%, or 95% (e.g., compared to the amount of Tau oligomerization in the absence of the anti-Tau antibody). In some embodiments, an anti-Tau antibody that recognizes an epitope within residues 186-205 of SEQ ID NO:1 prevents, reduces, or inhibits Tau aggregation, e.g., by at least 10%, 15%, 20%, 25%, 30%, 35%, 40%, 45%, 50%, 55%, 60%, 65%, 70%, 75%, 80%, 85%, 90%, or 95% (e.g., compared to the amount of Tau aggregation in the absence of the anti-Tau antibody). In some embodiments, an anti-Tau antibody that recognizes an epitope within residues 186-205 of SEQ ID NO: 1 prevents, reduces, or inhibits the binding of another anti-Tau antibody, e.g., by at least 10%, 15%, 20%, 25%, 30%, 35%, 40%, 45%, 50%, 55%, 60%, 65%, 70%, 75%, 80%, 85%, 90%, or 95% (e.g., compared to antibody binding in the absence of the anti-Tau antibody that recognizes an epitope within residues 186-205 of SEQ ID NO:1). Methods for measuring Tau seeding, spreading, oligomerization, and/or aggregation are known in the art. A specific example of one such method for measuring Tau seeding and/or aggregation is described in Example 2.

[0386] 17G2.A1

[0387] In some embodiments, an anti-Tau antibody comprises a heavy chain CDR1 sequence comprising the amino acid sequence of SEQ ID NO:168, a heavy chain CDR2 sequence comprising the amino acid sequence of SEQ ID NO:169, and a heavy chain CDR3 sequence comprising the amino acid sequence of SEQ ID NO:170. In some embodiments, an anti-Tau antibody comprises a light chain CDR1 sequence comprising the amino acid sequence of SEQ ID NO:172, a light chain CDR2 sequence comprising the amino acid sequence of SEQ ID NO:173, and a light chain CDR3 sequence comprising the amino acid sequence of SEQ ID NO:174. In some embodiments, an anti-Tau antibody comprises a heavy chain CDR1-3 and a light chain CDR1-3 comprising the amino acid sequences of SEQ ID NOS:168, 169, 170, 172, 173, and 174, respectively.

[0388] In some embodiments, an anti-Tau antibody comprises a heavy chain variable region comprising an amino acid sequence that has at least 90% sequence identity (e.g., at least 91%, at least 92%, at least 93%, at least 94%, at least 95%, at least 96%, at least 97%, at least 98%, or at least 99% sequence identity) to SEQ ID NO:167. In some embodiments, an anti-Tau antibody comprises a heavy chain variable region comprising the amino acid sequence of SEQ ID NO: 167.

[0389] In some embodiments, an anti-Tau antibody comprises a light chain variable region comprising an amino acid sequence that has at least 90% sequence identity (e.g., at least 91%, at least 92%, at least 93%, at least 94%, at least 95%, at least 96%, at least 97%, at least 98%, or at least 99% sequence identity) to SEQ ID NO:171. In some embodiments, an anti-Tau antibody comprises a light chain variable region comprising the amino acid sequence of SEQ ID NO:171.

[0390] In some embodiments, an anti-Tau antibody comprises a heavy chain variable region comprising an amino acid sequence that has at least 90% sequence identity (e.g., at least 91%, at least 92%, at least 93%, at least 94%, at least 95%, at least 96%, at least 97%, at least 98%, or at least 99% sequence identity) to SEQ ID NO: 167 and further comprises a light chain variable region comprising an amino acid sequence that has at least 90% sequence identity (e.g., at least 91%, at least 92%, at least 93%, at least 94%, at least 95%, at least 96%, at least 97%, at least 98%, or at least 99% sequence identity) to SEQ ID NO:171. In some embodiments, an anti-Tau antibody comprises a heavy chain variable region comprising the amino acid sequence of SEQ ID NO: 167 and further comprises a light chain variable region comprising the amino acid sequence of SEQ ID NO:171.

[0391] In some embodiments, an anti-Tau antibody is an antibody that competes for binding with an antibody as described herein (e.g., an antibody comprising a heavy chain CDR1-3 and a light chain CDR1-3 comprising the amino acid sequences of SEQ ID NOS:168, 169, 170, 172, 173, and 174, respectively, or an antibody comprising a heavy chain variable region comprising the amino acid sequence of SEQ ID NO: 167 and further comprising a light chain variable region comprising the amino acid sequence of SEQ ID NO: 171).

Humanized and Affinity Matured Anti-Tau Antibodies from Murine Anti-Tau Antibody 1C7

[0392] In some embodiments, an anti-Tau antibody is a humanized antibody. Generally, a non-human antibody is humanized in order to reduce its immunogenicity. Humanized antibodies typically comprise one or more variable regions (e.g., CDRs) or portions thereof that are non-human (e.g., derived from a mouse variable region sequence), and possibly some framework regions or portions thereof that are non-human, and further comprise one or more constant regions that are derived from human antibody sequences. Methods for humanizing non-human antibodies are known in the art. Transgenic mice, or other organisms such as other mammals, can be used to express humanized or human antibodies.

[0393] As described in Example 5, a humanized anti-Tau antibody was constructed by aligning the VL and VH regions from murine anti-Tau antibody 1C7 (mulC7) with the human VL kappa IV (VL_{KIV}) and human VH subgroup III (VH_{III}) consensus sequences (FIG. 3). Hypervariable regions (HVR) from the mulC7 were engineered into VL_{KIV} and VH_{III} acceptor frameworks to generate a CDR-graft variant. From the mulC7 VL region, positions 24-34 (L1), 50-56 (L2), and 89-97 (L3) were grafted into VL_{KIV}. From the mulC7 VH region, positions 26-35 (H1), 50-65 (H2), and 93-102 (H3) were grafted into VH_{III} (FIG. 3). To evaluate framework Vernier positions that might be important, selected Vernier positions S49 and S75 in VH were mutated back to the murine sequence to create humanized clones.

hulC7.v1, hulC7.v2, hulC7.v3, hulC7.v4, hulC7.v2-1, and hulC7.v2-2

[0394] In some embodiments, a humanized anti-Tau antibody comprises a heavy chain variable region comprising an amino acid sequence that has at least 90% sequence identity (e.g., at least 91%, at least 92%, at least 93%, at least 94%, at least 95%, at least 96%, at least 97%, at least 98%, or at least 99% sequence identity) to any one of SEQ ID NOS: 145-148. In some embodiments, an anti-Tau antibody comprises a heavy chain variable region comprising the amino acid sequence of any one of SEQ ID NOS:145-148.

[0395] In some embodiments, an anti-Tau antibody comprises a light chain variable region comprising an amino acid sequence that has at least 90% sequence identity (e.g., at least 91%, at least 92%, at least 93%, at least 94%, at least 95%, at least 96%, at least 97%, at least 98%, or at least 99% sequence identity) to SEQ ID NO: 149. In some embodiments, an anti-Tau antibody comprises a light chain variable region comprising the amino acid sequence of SEQ ID NO:149.

[0396] In some embodiments, an anti-Tau antibody comprises a light chain variable region comprising an amino acid sequence that has at least 90% sequence identity (e.g., at least 91%, at least 92%, at least 93%, at least 94%, at least 95%, at least 96%, at least 97%, at least 98%, or at least 99% sequence identity) to SEQ ID NO:463. In some embodiments, an anti-Tau antibody comprises a light chain variable region comprising the amino acid sequence of SEQ ID NO:463.

[0397] In some embodiments, an anti-Tau antibody comprises a light chain variable region comprising an amino acid sequence that has at least 90% sequence identity (e.g., at least 91%, at least 92%, at least 93%, at least 94%, at least 95%, at least 96%, at least 97%, at least 98%, or at least 99% sequence identity) to SEQ ID NO:464. In some embodiments, an anti-Tau antibody comprises a light chain variable region comprising the amino acid sequence of SEQ ID NO:464.

[0398] In some embodiments, an anti-Tau antibody comprises a heavy chain variable region comprising an amino acid sequence that has at least 90% sequence identity (e.g., at least 91%, at least 92%, at least 93%, at least 94%, at least 95%, at least 96%, at least 97%, at least 98%, or at least 99% sequence identity) to any one of SEQ ID NOS:145-148 and further comprises a light chain variable region comprising an amino acid sequence that has at least 90% sequence identity (e.g., at least 91%, at least 92%, at least 93%, at least 94%, at least 95%, at least 96%, at least 97%, at least 98%, or at least 99% sequence identity) to SEQ ID NO:149. In some embodiments, an anti-Tau antibody comprises a heavy chain variable region comprising the amino acid sequence of any one of SEQ ID NOS:145-148 and further comprises a light chain variable region comprising the amino acid sequence of SEQ ID NO: 149.

[0399] In some embodiments, an anti-Tau antibody comprises a heavy chain variable region comprising an amino acid sequence that has at least 90% sequence identity (e.g., at least 91%, at least 92%, at least 93%, at least 94%, at least 95%, at least 96%, at least 97%, at least 98%, or at least 99% sequence identity) to any one of SEQ ID NOS:145-148 and further comprises a light chain variable region comprising an amino acid sequence that has at least 90% sequence identity (e.g., at least 91%, at least 92%, at least 93%, at least 94%, at least 95%, at least 96%, at least 97%, at least 98%, or at least 99% sequence identity) to SEQ ID NO:463. In some embodiments, an anti-Tau antibody comprises a heavy chain variable region comprising the amino acid sequence of any one of SEQ ID NOS:145-148 and further comprises a light chain variable region comprising the amino acid sequence of SEQ ID NO:463.

[0400] In some embodiments, an anti-Tau antibody comprises a heavy chain variable region comprising an amino acid sequence that has at least 90% sequence identity (e.g., at least 91%, at least 92%, at least 93%, at least 94%, at least 95%, at least 96%, at least 97%, at least 98%, or at least 99% sequence identity) to any one of SEQ ID NOS:145-148 and further comprises a light chain variable region comprising an amino acid sequence that has at least 90% sequence identity (e.g., at least 91%, at least 92%, at least 93%, at least 94%, at least 95%, at least 96%, at least 97%, at least 98%, or at least 99% sequence identity) to SEQ ID NO:464. In some embodiments, an anti-Tau antibody comprises a heavy chain variable region comprising the amino acid sequence of any one of SEQ ID NOS:145-148 and further comprises a light chain variable region comprising the amino acid sequence of SEQ ID NO:464.

[0401] In some embodiments, phage libraries containing changes in hypervariable regions may be generated to improve the affinity of an anti-Tau antibody (see, e.g., Example 5). Phage selections may be performed to enrich for clones with high binding affinity. Selected clones may be subsequently sequenced and their binding affinities may be evaluated using Biacore™.

[0402] In some embodiments, an anti-Tau antibody comprises one or more CDRs selected from the group consisting of:
[0403] (a) a heavy chain CDR1 comprising an amino acid sequence that has at least 90% sequence identity (e.g., at least 91%, at least 92%, at least 93%, at least 94%, at least 95%, at least 96%, at least 97%, at least 98%, or at least 99% sequence identity) to any one of SEQ ID NOS:22, 150-154, and 420-437;
[0404] (b) a heavy chain CDR2 comprising an amino acid sequence that has at least 90% sequence identity (e.g., at least 91%, at least 92%, at least 93%, at least 94%, at least 95%, at least 96%, at least 97%, at least 98%, or at least 99% sequence identity) to any one of SEQ ID NOS:23 and 438-443;
[0405] (c) a heavy chain CDR3 comprising an amino acid sequence that has at least 90% sequence identity (e.g., at least 91%, at least 92%, at least 93%, at least 94%, at least 95%, at least 96%, at least 97%, at least 98%, or at least 99% sequence identity) to any one of SEQ ID NOS:24 and 155;
[0406] (d) a light chain CDR1 comprising an amino acid sequence that has at least 90% sequence identity (e.g., at least 91%, at least 92%, at least 93%, at least 94%, at least 95%, at least 96%, at least 97%, at least 98%, or at least 99% sequence identity) to any one of SEQ ID NOS:26, 156-158, and 444-459;
[0407] (e) a light chain CDR2 comprising an amino acid sequence that has at least 90% sequence identity (e.g., at least 91%, at least 92%, at least 93%, at least 94%, at least 95%, at least 96%, at least 97%, at least 98%, or at least 99% sequence identity) to SEQ ID NO:27; and
[0408] (f) a light chain CDR3 comprising an amino acid sequence that has at least 90% sequence identity (e.g., at least 91%, at least 92%, at least 93%, at least 94%, at least 95%, at least 96%, at least 97%, at least 98%, or at least 99% sequence identity) to any one of SEQ ID NOS:28, 159-162, and 460-462.

[0409] In some embodiments, an affinity matured anti-Tau antibody comprises two, three, four, five, or all six of (a)-(f). In some embodiments, an anti-Tau antibody comprises the heavy chain CDR1 of (a), the heavy chain CDR2 of (b), and the heavy chain CDR3 of (c). In some embodiments, an anti-Tau antibody comprises the light chain CDR1 of (d), the light chain CDR2 of (e), and the light chain CDR3 of (f).

[0410] In In some embodiments, an anti-Tau antibody comprises one or more CDRs selected from the group consisting of:
[0411] (a) a heavy chain CDR1 comprising the amino acid sequence of any one of SEQ ID NOS:22, 150-154, and 420-437;
[0412] (b) a heavy chain CDR2 comprising the amino acid sequence of any one of SEQ ID NOS:23 and 438-443;
[0413] (c) a heavy chain CDR3 comprising the amino acid sequence of any one of SEQ ID NOS:24 and 155;
[0414] (d) a light chain CDR1 comprising the amino acid sequence of any one of SEQ ID NOS:26, 156-158, and 444-459;
[0415] (e) a light chain CDR2 comprising the amino acid sequence of SEQ ID NO:27; and
[0416] (f) a light chain CDR3 comprising the amino acid sequence of any one of SEQ ID NOS:28, 159-162, and 460-462.

[0417] In some embodiments, an affinity matured anti-Tau antibody comprises two, three, four, five, or all six of (a)-(f). In some embodiments, an anti-Tau antibody comprises the heavy chain CDR1 of (a), the heavy chain CDR2 of (b), and the heavy chain CDR3 of (c). In some embodiments, an anti-Tau antibody comprises the light chain CDR1 of (d), the light chain CDR2 of (e), and the light chain CDR3 of (f).

[0418] In some embodiments, an affinity matured anti-Tau antibody comprises one or more CDRs selected from the group consisting of:
[0419] (a) a heavy chain CDR1 having up to six amino acid substitutions relative to the amino acid sequence of SEQ ID NO:22 (b) a heavy chain CDR2 having up to two amino acid substitutions relative to the amino acid sequence of SEQ ID NO:23;
[0420] (c) a heavy chain CDR3 having up to two amino acid substitutions relative to the amino acid sequence of SEQ ID NO:24;
[0421] (d) a light chain CDR1 having up to eight amino acid substitutions relative to the amino acid sequence of SEQ ID NO:26;
[0422] (e) a light chain CDR2 having up to two amino acid substitutions relative to the amino acid sequence of SEQ ID NO:27; and
[0423] (f) a light chain CDR3 having up to three amino acid substitutions relative to the amino acid sequence of SEQ ID NO:28.

[0424] In some embodiments, an affinity matured anti-Tau antibody comprises two, three, four, five, or all six of (a)-(f). In some embodiments, an anti-Tau antibody comprises the heavy chain CDR1 of (a), the heavy chain CDR2 of (b), and the heavy chain CDR3 of (c). In some embodiments, an anti-Tau antibody comprises the light chain CDR1 of (d), the light chain CDR2 of (e), and the light chain CDR3 of (f).

[0425] In some embodiments, an affinity matured anti-Tau antibody comprises one or more CDRs selected from the group consisting of:
[0426] (a) a heavy chain CDR1 having up to six amino acid substitutions relative to the amino acid sequence of SEQ ID NO:22 (b) a heavy chain CDR2 having up to two amino acid substitutions relative to the amino acid sequence of SEQ ID NO:23;
[0427] (c) a heavy chain CDR3 having up to two amino acid substitutions relative to the amino acid sequence of SEQ ID NO:24;
[0428] (d) a light chain CDR1 having up to eight amino acid substitutions relative to the amino acid sequence of SEQ ID NO:450;
[0429] (e) a light chain CDR2 having up to two amino acid substitutions relative to the amino acid sequence of SEQ ID NO:27; and
[0430] (f) a light chain CDR3 having up to three amino acid substitutions relative to the amino acid sequence of SEQ ID NO:461.

[0431] In some embodiments, an affinity matured anti-Tau antibody comprises two, three, four, five, or all six of (a)-(f). In some embodiments, an anti-Tau antibody comprises the heavy chain CDR1 of (a), the heavy chain CDR2 of (b), and the heavy chain CDR3 of (c). In some embodiments, an anti-Tau antibody comprises the light chain CDR1 of (d), the light chain CDR2 of (e), and the light chain CDR3 of (f).

[0432] In some embodiments, an affinity matured anti-Tau antibody comprises one or more CDRs selected from the group consisting of:
[0433] (a) a heavy chain CDR1 having up to six amino acid substitutions relative to the amino acid sequence of SEQ ID NO:22
[0434] (b) a heavy chain CDR2 having up to two amino acid substitutions relative to the amino acid sequence of SEQ ID NO:23;
[0435] (c) a heavy chain CDR3 having up to two amino acid substitutions relative to the amino acid sequence of SEQ ID NO:24;
[0436] (d) a light chain CDR1 having up to eight amino acid substitutions relative to the amino acid sequence of SEQ ID NO:459;
[0437] (e) a light chain CDR2 having up to two amino acid substitutions relative to the amino acid sequence of SEQ ID NO:27; and
[0438] (f) a light chain CDR3 having up to three amino acid substitutions relative to the amino acid sequence of SEQ ID NO:461.

[0439] In some embodiments, an affinity matured anti-Tau antibody comprises two, three, four, five, or all six of (a)-(f). In some embodiments, an anti-Tau antibody comprises the heavy chain CDR1 of (a), the heavy chain CDR2 of (b), and the heavy chain CDR3 of (c). In some embodiments, an anti-Tau antibody comprises the light chain CDR1 of (d), the light chain CDR2 of (e), and the light chain CDR3 of (f).

[0440] In some embodiments, an anti-Tau antibody comprises one or more CDRs selected from the group consisting of:
[0441] (a) a heavy chain CDR1 comprising the amino acid sequence of SEQ ID NO:163;
[0442] (b) a heavy chain CDR2 comprising the amino acid sequence of SEQ ID NO:23;
[0443] (c) a heavy chain CDR3 comprising the amino acid sequence of SEQ ID NOS:164;
[0444] (d) a light chain CDR1 comprising the amino acid sequence of SEQ ID NO:165;
[0445] (e) a light chain CDR2 comprising the amino acid sequence of SEQ ID NO:27; and
[0446] (f) a light chain CDR3 comprising the amino acid sequence of SEQ ID NO:166.

[0447] In some embodiments, an affinity matured anti-Tau antibody comprises two, three, four, five, or all six of (a)-(f). In some embodiments, an anti-Tau antibody comprises the heavy chain CDR1 of (a), the heavy chain CDR2 of (b), and the heavy chain CDR3 of (c). In some embodiments, an anti-Tau antibody comprises the light chain CDR1 of (d), the light chain CDR2 of (e), and the light chain CDR3 of (f).

[0448] In some embodiments, an anti-Tau antibody comprises one or more CDRs selected from the group consisting of:
[0449] (a) a heavy chain CDR1 comprising the amino acid sequence of SEQ ID NO:465;
[0450] (b) a heavy chain CDR2 comprising the amino acid sequence of SEQ ID NO:466;
[0451] (c) a heavy chain CDR3 comprising the amino acid sequence of SEQ ID NOS:24;
[0452] (d) a light chain CDR1 comprising the amino acid sequence of SEQ ID NO:467;
[0453] (e) a light chain CDR2 comprising the amino acid sequence of SEQ ID NO:27; and
[0454] (f) a light chain CDR3 comprising the amino acid sequence of SEQ ID NO:468.

[0455] In some embodiments, an affinity matured anti-Tau antibody comprises two, three, four, five, or all six of (a)-(f). In some embodiments, an anti-Tau antibody comprises the heavy chain CDR1 of (a), the heavy chain CDR2 of (b), and the heavy chain CDR3 of (c). In some embodiments, an anti-Tau antibody comprises the light chain CDR1 of (d), the light chain CDR2 of (e), and the light chain CDR3 of (f).

[0456] In some embodiments, an anti-Tau antibody comprises one or more CDRs selected from the group consisting of:
[0457] (a) a heavy chain CDR1 having at least 90% sequence identity to the amino acid sequence of SEQ ID NO:22 or having up to two amino acid substitutions relative to the amino acid sequence of SEQ ID NO:22;
[0458] (b) a heavy chain CDR2 having at least 90% sequence identity to the amino acid sequence of SEQ ID NO:23 or having up to two amino acid substitutions relative to the amino acid sequence of SEQ ID NO:23;
[0459] (c) a heavy chain CDR3 having at least 90% sequence identity to the amino acid sequence of SEQ ID NO:24 or having up to two amino acid substitutions relative to the amino acid sequence of SEQ ID NO:24;
[0460] (d) a light chain CDR1 having at least 90% sequence identity to the amino acid sequence of SEQ ID NO:450 or having up to two amino acid substitutions relative to the amino acid sequence of SEQ ID NO:450;
[0461] (e) a light chain CDR2 having at least 90% sequence identity to the amino acid sequence of SEQ ID NO:27 or having up to two amino acid substitutions relative to the amino acid sequence of SEQ ID NO:27; and
[0462] (f) a light chain CDR3 having at least 90% sequence identity to the amino acid sequence of SEQ ID NO:461 or having up to two amino acid substitutions relative to the amino acid sequence of SEQ ID NO:461.

[0463] In some embodiments, an anti-Tau antibody comprises two, three, four, five, or all six of (a)-(f). In some embodiments, an anti-Tau antibody comprises the heavy chain CDR1 of (a), the heavy chain CDR2 of (b), and the heavy chain CDR3 of (c). In some embodiments, an anti-Tau antibody comprises the light chain CDR1 of (d), the light chain CDR2 of (e), and the light chain CDR3 of (f). In some embodiments, a CDR having up to two amino acid substitutions has one amino acid substitution relative to the reference sequence. In some embodiments, a CDR having up to two amino acid substitutions has two amino acid substitutions relative to the reference sequence. In some embodiments, the up to two amino acid substitutions are conservative substitutions.

[0464] In some embodiments, an anti-Tau antibody comprises one or more CDRs selected from the group consisting of:
[0465] (a) a heavy chain CDR1 comprising the amino acid sequence of SEQ ID NO:22;
[0466] (b) a heavy chain CDR2 comprising the amino acid sequence of SEQ ID NO:23;
[0467] (c) a heavy chain CDR3 comprising the amino acid sequence of SEQ ID NOS:24;
[0468] (d) a light chain CDR1 comprising the amino acid sequence of SEQ ID NO:450;
[0469] (e) a light chain CDR2 comprising the amino acid sequence of SEQ ID NO:27; and
[0470] (f) a light chain CDR3 comprising the amino acid sequence of SEQ ID NO:461.

[0471] In some embodiments, an anti-Tau antibody comprises two, three, four, five, or all six of (a)-(f). In some embodiments, an anti-Tau antibody comprises the heavy chain CDR1 of (a), the heavy chain CDR2 of (b), and the heavy chain CDR3 of (c). In some embodiments, an anti-Tau antibody comprises the light chain CDR1 of (d), the light chain CDR2 of (e), and the light chain CDR3 of (f).

[0472] In some embodiments, an anti-Tau antibody comprises one or more CDRs selected from the group consisting of:
[0473] (a) a heavy chain CDR1 having at least 90% sequence identity to the amino acid sequence of SEQ ID NO:22 or having up to two amino acid substitutions relative to the amino acid sequence of SEQ ID NO:22;
[0474] (b) a heavy chain CDR2 having at least 90% sequence identity to the amino acid sequence of SEQ ID NO:23 or having up to two amino acid substitutions relative to the amino acid sequence of SEQ ID NO:23;
[0475] (c) a heavy chain CDR3 having at least 90% sequence identity to the amino acid sequence of SEQ ID NO:24 or having up to two amino acid substitutions relative to the amino acid sequence of SEQ ID NO:24;
[0476] (d) a light chain CDR1 having at least 90% sequence identity to the amino acid sequence of SEQ ID NO:459 or having up to two amino acid substitutions relative to the amino acid sequence of SEQ ID NO:459;
[0477] (e) a light chain CDR2 having at least 90% sequence identity to the amino acid sequence of SEQ ID NO:27 or having up to two amino acid substitutions relative to the amino acid sequence of SEQ ID NO:27; and
[0478] (f) a light chain CDR3 having at least 90% sequence identity to the amino acid sequence of SEQ ID NO:461 or having up to two amino acid substitutions relative to the amino acid sequence of SEQ ID NO:461.

[0479] In some embodiments, an anti-Tau antibody comprises two, three, four, five, or all six of (a)-(f). In some embodiments, an anti-Tau antibody comprises the heavy chain CDR1 of (a), the heavy chain CDR2 of (b), and the heavy chain CDR3 of (c). In some embodiments, an anti-Tau antibody comprises the light chain CDR1 of (d), the light chain CDR2 of (e), and the light chain CDR3 of (f). In some embodiments, a CDR having up to two amino acid substitutions has one amino acid substitution relative to the reference sequence. In some embodiments, a CDR having up to two amino acid substitutions has two amino acid substitutions relative to the reference sequence. In some embodiments, the up to two amino acid substitutions are conservative substitutions.

[0480] In some embodiments, an anti-Tau antibody comprises one or more CDRs selected from the group consisting of:
[0481] (a) a heavy chain CDR1 comprising the amino acid sequence of SEQ ID NO:22;
[0482] (b) a heavy chain CDR2 comprising the amino acid sequence of SEQ ID NO:23;
[0483] (c) a heavy chain CDR3 comprising the amino acid sequence of SEQ ID NOS:24;
[0484] (d) a light chain CDR1 comprising the amino acid sequence of SEQ ID NO:459;
[0485] (e) a light chain CDR2 comprising the amino acid sequence of SEQ ID NO:27; and
[0486] (f) a light chain CDR3 comprising the amino acid sequence of SEQ ID NO:461.

[0487] In some embodiments, an anti-Tau antibody comprises two, three, four, five, or all six of (a)-(f). In some embodiments, an anti-Tau antibody comprises the heavy chain CDR1 of (a), the heavy chain CDR2 of (b), and the heavy chain CDR3 of (c). In some embodiments, an anti-Tau antibody comprises the light chain CDR1 of (d), the light chain CDR2 of (e), and the light chain CDR3 of (f).

[0488] In some embodiments, an anti-Tau antibody comprises one or more CDRs selected from the group consisting of:
[0489] (a) a heavy chain CDR1 having at least 90% sequence identity to the amino acid sequence of SEQ ID NO: 150 or 151 or having up to two amino acid substitutions relative to the amino acid sequence of SEQ ID NO:150 or 151;
[0490] (b) a heavy chain CDR2 having at least 90% sequence identity to the amino acid sequence of SEQ ID NO:23 or having up to two amino acid substitutions relative to the amino acid sequence of SEQ ID NO:23;
[0491] (c) a heavy chain CDR3 having at least 90% sequence identity to the amino acid sequence of SEQ ID NO:155 or having up to two amino acid substitutions relative to the amino acid sequence of SEQ ID NO: 155;
[0492] (d) a light chain CDR1 having at least 90% sequence identity to the amino acid sequence of SEQ ID NO:450 or having up to two amino acid substitutions relative to the amino acid sequence of SEQ ID NO:450;
[0493] (e) a light chain CDR2 having at least 90% sequence identity to the amino acid sequence of SEQ ID NO:27 or having up to two amino acid substitutions relative to the amino acid sequence of SEQ ID NO:27; and
[0494] (f) a light chain CDR3 having at least 90% sequence identity to the amino acid sequence of SEQ ID NO:461 or having up to two amino acid substitutions relative to the amino acid sequence of SEQ ID NO:461.

[0495] In some embodiments, an anti-Tau antibody comprises one or more CDRs selected from the group consisting of:
[0496] (a) a heavy chain CDR1 having the amino acid sequence of SEQ ID NO:150 or 151;
[0497] (b) a heavy chain CDR2 having the amino acid sequence of SEQ ID NO:23;
[0498] (c) a heavy chain CDR3 having the amino acid sequence of SEQ ID NO: 155;
[0499] (d) a light chain CDR1 having the amino acid sequence of SEQ ID NO:450;
[0500] (e) a light chain CDR2 having the amino acid sequence of SEQ ID NO:27; and
[0501] (f) a light chain CDR3 having the amino acid sequence of SEQ ID NO:461.

[0502] In some embodiments, an anti-Tau antibody comprises one or more CDRs selected from the group consisting of:
[0503] (a) a heavy chain CDR1 having at least 90% sequence identity to the amino acid sequence of SEQ ID NO: 150 or 151 or having up to two amino acid substitutions relative to the amino acid sequence of SEQ ID NO:150 or 151;
[0504] (b) a heavy chain CDR2 having at least 90% sequence identity to the amino acid sequence of SEQ ID NO:23 or having up to two amino acid substitutions relative to the amino acid sequence of SEQ ID NO:23;
[0505] (c) a heavy chain CDR3 having at least 90% sequence identity to the amino acid sequence of SEQ ID NO:155 or having up to two amino acid substitutions relative to the amino acid sequence of SEQ ID NO: 155;
[0506] (d) a light chain CDR1 having at least 90% sequence identity to the amino acid sequence of SEQ ID NO:459 or having up to two amino acid substitutions relative to the amino acid sequence of SEQ ID NO:459;
[0507] (e) a light chain CDR2 having at least 90% sequence identity to the amino acid sequence of SEQ ID NO:27 or having up to two amino acid substitutions relative to the amino acid sequence of SEQ ID NO:27; and
[0508] (f) a light chain CDR3 having at least 90% sequence identity to the amino acid sequence of SEQ ID NO:461 or having up to two amino acid substitutions relative to the amino acid sequence of SEQ ID NO:461.

[0509] In some embodiments, an anti-Tau antibody comprises one or more CDRs selected from the group consisting of:
[0510] (a) a heavy chain CDR1 having the amino acid sequence of SEQ ID NO:150 or 151;
[0511] (b) a heavy chain CDR2 having the amino acid sequence of SEQ ID NO:23;
[0512] (c) a heavy chain CDR3 having the amino acid sequence of SEQ ID NO: 155;
[0513] (d) a light chain CDR1 having the amino acid sequence of SEQ ID NO:459;
[0514] (e) a light chain CDR2 having the amino acid sequence of SEQ ID NO:27; and
[0515] (f) a light chain CDR3 having the amino acid sequence of SEQ ID NO:461.

[0516] In some embodiments, an anti-Tau antibody comprises one or more CDRs selected from the group consisting of:
[0517] (a) a heavy chain CDR1 having at least 90% sequence identity to the amino acid sequence of SEQ ID NO:153 or having up to two amino acid substitutions relative to the amino acid sequence of SEQ ID NO:153;
[0518] (b) a heavy chain CDR2 having at least 90% sequence identity to the amino acid sequence of SEQ ID NO:23 or having up to two amino acid substitutions relative to the amino acid sequence of SEQ ID NO:23;
[0519] (c) a heavy chain CDR3 having at least 90% sequence identity to the amino acid sequence of SEQ ID NO:24 or having up to two amino acid substitutions relative to the amino acid sequence of SEQ ID NO:24;
[0520] (d) a light chain CDR1 having at least 90% sequence identity to the amino acid sequence of SEQ ID NO:158 or having up to two amino acid substitutions relative to the amino acid sequence of SEQ ID NO:158;
[0521] (e) a light chain CDR2 having at least 90% sequence identity to the amino acid sequence of SEQ ID NO:27 or having up to two amino acid substitutions relative to the amino acid sequence of SEQ ID NO:27; and
[0522] (f) a light chain CDR3 having at least 90% sequence identity to the amino acid sequence of SEQ ID NO:28 or having up to two amino acid substitutions relative to the amino acid sequence of SEQ ID NO:28.

[0523] In some embodiments, an anti-Tau antibody comprises two, three, four, five, or all six of (a)-(f). In some embodiments, an anti-Tau antibody comprises the heavy chain CDR1 of (a), the heavy chain CDR2 of (b), and the heavy chain CDR3 of (c). In some embodiments, an anti-Tau antibody comprises the light chain CDR1 of (d), the light chain CDR2 of (e), and the light chain CDR3 of (f). In some embodiments, a CDR having up to two amino acid substitutions has one amino acid substitution relative to the reference sequence. In some embodiments, a CDR having up to two amino acid substitutions has two amino acid substitutions relative to the reference sequence. In some embodiments, the up to two amino acid substitutions are conservative substitutions.

[0524] In some embodiments, an anti-Tau antibody comprises one or more CDRs selected from the group consisting of:
[0525] (a) a heavy chain CDR1 comprising the amino acid sequence of SEQ ID NO:153;
[0526] (b) a heavy chain CDR2 comprising the amino acid sequence of SEQ ID NO:23;
[0527] (c) a heavy chain CDR3 comprising the amino acid sequence of SEQ ID NOS:24;
[0528] (d) a light chain CDR1 comprising the amino acid sequence of SEQ ID NO:158;
[0529] (e) a light chain CDR2 comprising the amino acid sequence of SEQ ID NO:27; and
[0530] (f) a light chain CDR3 comprising the amino acid sequence of SEQ ID NO:28.

[0531] In some embodiments, an anti-Tau antibody comprises two, three, four, five, or all six of (a)-(f). In some embodiments, an anti-Tau antibody comprises the heavy chain CDR1 of (a), the heavy chain CDR2 of (b), and the heavy chain CDR3 of (c). In some embodiments, an anti-Tau antibody comprises the light chain CDR1 of (d), the light chain CDR2 of (e), and the light chain CDR3 of (f).

[0532] In some embodiments, an anti-Tau antibody comprises one or more CDRs selected from the group consisting of:
[0533] (a) a heavy chain CDR1 having at least 90% sequence identity to the amino acid sequence of SEQ ID NO:150 or having up to two amino acid substitutions relative to the amino acid sequence of SEQ ID NO:150;
[0534] (b) a heavy chain CDR2 having at least 90% sequence identity to the amino acid sequence of SEQ ID NO:23 or having up to two amino acid substitutions relative to the amino acid sequence of SEQ ID NO:23;
[0535] (c) a heavy chain CDR3 having at least 90% sequence identity to the amino acid sequence of SEQ ID NO:24 or having up to two amino acid substitutions relative to the amino acid sequence of SEQ ID NO:24;
[0536] (d) a light chain CDR1 having at least 90% sequence identity to the amino acid sequence of SEQ ID NO:158 or having up to two amino acid substitutions relative to the amino acid sequence of SEQ ID NO:158;
[0537] (e) a light chain CDR2 having at least 90% sequence identity to the amino acid sequence of SEQ ID NO:27 or having up to two amino acid substitutions relative to the amino acid sequence of SEQ ID NO:27; and
[0538] (f) a light chain CDR3 having at least 90% sequence identity to the amino acid sequence of SEQ ID NO:28 or having up to two amino acid substitutions relative to the amino acid sequence of SEQ ID NO:28.

[0539] In some embodiments, an anti-Tau antibody comprises two, three, four, five, or all six of (a)-(f). In some embodiments, an anti-Tau antibody comprises the heavy chain CDR1 of (a), the heavy chain CDR2 of (b), and the heavy chain CDR3 of (c). In some embodiments, an anti-Tau antibody comprises the light chain CDR1 of (d), the light chain CDR2 of (e), and the light chain CDR3 of (f). In some embodiments, a CDR having up to two amino acid substitutions has one amino acid substitution relative to the reference sequence. In some embodiments, a CDR having up to two amino acid substitutions has two amino acid substitutions relative to the reference sequence. In some embodiments, the up to two amino acid substitutions are conservative substitutions.

[0540] In some embodiments, an anti-Tau antibody comprises one or more CDRs selected from the group consisting of:
[0541] (a) a heavy chain CDR1 comprising the amino acid sequence of SEQ ID NO:150;
[0542] (b) a heavy chain CDR2 comprising the amino acid sequence of SEQ ID NO:23;
[0543] (c) a heavy chain CDR3 comprising the amino acid sequence of SEQ ID NOS:24;
[0544] (d) a light chain CDR1 comprising the amino acid sequence of SEQ ID NO:158;
[0545] (e) a light chain CDR2 comprising the amino acid sequence of SEQ ID NO:27; and
[0546] (f) a light chain CDR3 comprising the amino acid sequence of SEQ ID NO:28.

[0547] In some embodiments, an anti-Tau antibody comprises two, three, four, five, or all six of (a)-(f). In some embodiments, an anti-Tau antibody comprises the heavy chain CDR1 of (a), the heavy chain CDR2 of (b), and the heavy chain CDR3 of (c). In some embodiments, an anti-Tau antibody comprises the light chain CDR1 of (d), the light chain CDR2 of (e), and the light chain CDR3 of (f).

[0548] In some embodiments, an anti-Tau antibody comprises one or more CDRs selected from the group consisting of:
[0549] (a) a heavy chain CDR1 having at least 90% sequence identity to the amino acid sequence of SEQ ID NO:22 or having up to two amino acid substitutions relative to the amino acid sequence of SEQ ID NO:22;
[0550] (b) a heavy chain CDR2 having at least 90% sequence identity to the amino acid sequence of SEQ ID NO:23 or having up to two amino acid substitutions relative to the amino acid sequence of SEQ ID NO:23;
[0551] (c) a heavy chain CDR3 having at least 90% sequence identity to the amino acid sequence of SEQ ID NO:155 or having up to two amino acid substitutions relative to the amino acid sequence of SEQ ID NO: 155;
[0552] (d) a light chain CDR1 having at least 90% sequence identity to the amino acid sequence of SEQ ID NO:158 or having up to two amino acid substitutions relative to the amino acid sequence of SEQ ID NO:158;
[0553] (e) a light chain CDR2 having at least 90% sequence identity to the amino acid sequence of SEQ ID NO:27 or having up to two amino acid substitutions relative to the amino acid sequence of SEQ ID NO:27; and
[0554] (f) a light chain CDR3 having at least 90% sequence identity to the amino acid sequence of SEQ ID NO:28 or having up to two amino acid substitutions relative to the amino acid sequence of SEQ ID NO:28.

[0555] In some embodiments, an anti-Tau antibody comprises two, three, four, five, or all six of (a)-(f). In some embodiments, an anti-Tau antibody comprises the heavy chain CDR1 of (a), the heavy chain CDR2 of (b), and the heavy chain CDR3 of (c). In some embodiments, an anti-Tau antibody comprises the light chain CDR1 of (d), the light chain CDR2 of (e), and the light chain CDR3 of (f). In some embodiments, a CDR having up to two amino acid substitutions has one amino acid substitution relative to the reference sequence. In some embodiments, a CDR having up to two amino acid substitutions has two amino acid substitutions relative to the reference sequence. In some embodiments, the up to two amino acid substitutions are conservative substitutions.

[0556] In some embodiments, an anti-Tau antibody comprises one or more CDRs selected from the group consisting of:
[0557] (a) a heavy chain CDR1 comprising the amino acid sequence of SEQ ID NO:22;
[0558] (b) a heavy chain CDR2 comprising the amino acid sequence of SEQ ID NO:23;
[0559] (c) a heavy chain CDR3 comprising the amino acid sequence of SEQ ID NOS:155;
[0560] (d) a light chain CDR1 comprising the amino acid sequence of SEQ ID NO:158;
[0561] (e) a light chain CDR2 comprising the amino acid sequence of SEQ ID NO:27; and
[0562] (f) a light chain CDR3 comprising the amino acid sequence of SEQ ID NO:28.

[0563] In some embodiments, an anti-Tau antibody comprises two, three, four, five, or all six of (a)-(f). In some embodiments, an anti-Tau antibody comprises the heavy chain CDR1 of (a), the heavy chain CDR2 of (b), and the heavy chain CDR3 of (c). In some embodiments, an anti-Tau antibody comprises the light chain CDR1 of (d), the light chain CDR2 of (e), and the light chain CDR3 of (f).

[0564] In some embodiments, an anti-Tau antibody comprises a heavy chain CDR1 sequence comprising the amino acid sequence of SEQ ID NO:151, a heavy chain CDR2 sequence comprising the amino acid sequence of SEQ ID NO:588, and a heavy chain CDR3 sequence comprising the amino acid sequence of SEQ ID NO:24. In some embodiments, an anti-Tau antibody comprises a heavy chain variable region comprising heavy chain CDR1-3 sequences of SEQ ID NOS:151, 588, and 24, respectively, and an amino acid sequence that has at least 90% sequence identity (e.g., at least 91%, at least 92%, at least 93%, at least 94%, at least 95%, at least 96%, at least 97%, at least 98%, or at least 99% sequence identity) to SEQ ID NO:589. In some embodiments, an anti-Tau antibody comprises a heavy chain variable region comprising the amino acid sequence of SEQ ID NO:589.

[0565] In some embodiments, an anti-Tau antibody comprises a heavy chain CDR1 sequence comprising the amino acid sequence of SEQ ID NO:426, a heavy chain CDR2 sequence comprising the amino acid sequence of SEQ ID NO:588, and a heavy chain CDR3 sequence comprising the amino acid sequence of SEQ ID NO:24. In some embodiments, an anti-Tau antibody comprises a heavy chain variable region comprising heavy chain CDR1-3 sequences of SEQ ID NOS:426, 588, and 24, respectively, and an amino acid sequence that has at least 90% sequence identity (e.g., at least 91%, at least 92%, at least 93%, at least 94%, at least 95%, at least 96%, at least 97%, at least 98%, or at least 99% sequence identity) to SEQ ID NO:590. In some embodiments, an anti-Tau antibody comprises a heavy chain variable region comprising the amino acid sequence of SEQ ID NO:590.

[0566] In some embodiments, an anti-Tau antibody comprises a heavy chain CDR1 sequence comprising the amino acid sequence of SEQ ID NO:427, a heavy chain CDR2 sequence comprising the amino acid sequence of SEQ ID NO:588, and a heavy chain CDR3 sequence comprising the amino acid sequence of SEQ ID NO:24. In some embodiments, an anti-Tau antibody comprises a heavy chain variable region comprising heavy chain CDR1-3 sequences of SEQ ID NOS:427, 588, and 24, respectively, and an amino acid sequence that has at least 90% sequence identity (e.g., at least 91%, at least 92%, at least 93%, at least 94%, at least 95%, at least 96%, at least 97%, at least 98%, or at least 99% sequence identity) to SEQ ID NO:591. In some embodiments, an anti-Tau antibody comprises a heavy chain variable region comprising the amino acid sequence of SEQ ID NO:591.

[0567] In some embodiments, an anti-Tau antibody comprises a heavy chain CDR1 sequence comprising the amino acid sequence of SEQ ID NO:428, a heavy chain CDR2 sequence comprising the amino acid sequence of SEQ ID NO:588, and a heavy chain CDR3 sequence comprising the amino acid sequence of SEQ ID NO:24. In some embodiments, an anti-Tau antibody comprises a heavy chain variable region comprising heavy chain CDR1-3 sequences of SEQ ID NOS:428, 588, and 24, respectively, and an amino acid sequence that has at least 90% sequence identity (e.g., at least 91%, at least 92%, at least 93%, at least 94%, at least 95%, at least 96%, at least 97%, at least 98%, or at least 99% sequence identity) to SEQ ID NO:592. In some embodiments, an anti-Tau antibody comprises a heavy chain variable region comprising the amino acid sequence of SEQ ID NO:592.

[0568] In some embodiments, an anti-Tau antibody comprises a heavy chain CDR1 sequence comprising the amino acid sequence of SEQ ID NO:429, a heavy chain CDR2 sequence comprising the amino acid sequence of SEQ ID NO:588, and a heavy chain CDR3 sequence comprising the amino acid sequence of SEQ ID NO:24. In some embodiments, an anti-Tau antibody comprises a heavy chain variable region comprising heavy chain CDR1-3 sequences of SEQ ID NOS:429, 588, and 24, respectively, and an amino acid sequence that has at least 90% sequence identity (e.g., at least 91%, at least 92%, at least 93%, at least 94%, at least 95%, at least 96%, at least 97%, at least 98%, or at least 99% sequence identity) to SEQ ID NO:593. In some embodiments, an anti-Tau antibody comprises a heavy chain variable region comprising the amino acid sequence of SEQ ID NO:593.

[0569] In some embodiments, an anti-Tau antibody comprises a heavy chain CDR1 sequence comprising the amino acid sequence of SEQ ID NO:430, a heavy chain CDR2 sequence comprising the amino acid sequence of SEQ ID NO:588, and a heavy chain CDR3 sequence comprising the amino acid sequence of SEQ ID NO:24. In some embodiments, an anti-Tau antibody comprises a heavy chain variable region comprising heavy chain CDR1-3 sequences of SEQ ID NOS:430, 588, and 24, respectively, and an amino acid sequence that has at least 90% sequence identity (e.g., at least 91%, at least 92%, at least 93%, at least 94%, at least 95%, at least 96%, at least 97%, at least 98%, or at least 99% sequence identity) to SEQ ID NO:594. In some embodiments, an anti-Tau antibody comprises a heavy chain variable region comprising the amino acid sequence of SEQ ID NO:594.

[0570] In some embodiments, an anti-Tau antibody comprises a heavy chain CDR1 sequence comprising the amino acid sequence of SEQ ID NO:432, a heavy chain CDR2 sequence comprising the amino acid sequence of SEQ ID NO:588, and a heavy chain CDR3 sequence comprising the amino acid sequence of SEQ ID NO:24. In some embodiments, an anti-Tau antibody comprises a heavy chain variable region comprising heavy chain CDR1-3 sequences of SEQ ID NOS:432, 588, and 24, respectively, and an amino acid sequence that has at least 90% sequence identity (e.g., at least 91%, at least 92%, at least 93%, at least 94%, at least 95%, at least 96%, at least 97%, at least 98%, or at least 99% sequence identity) to SEQ ID NO:595. In some embodiments, an anti-Tau antibody comprises a heavy chain variable region comprising the amino acid sequence of SEQ ID NO:595.

[0571] In some embodiments, an anti-Tau antibody comprises a heavy chain CDR1 sequence comprising the amino acid sequence of SEQ ID NO:153, a heavy chain CDR2 sequence comprising the amino acid sequence of SEQ ID NO:588, and a heavy chain CDR3 sequence comprising the amino acid sequence of SEQ ID NO:24. In some embodiments, an anti-Tau antibody comprises a heavy chain variable region comprising heavy chain CDR1-3 sequences of SEQ ID NOS:153, 588, and 24, respectively, and an amino acid sequence that has at least 90% sequence identity (e.g., at least 91%, at least 92%, at least 93%, at least 94%, at least 95%, at least 96%, at least 97%, at least 98%, or at least 99% sequence identity) to SEQ ID NO:596. In some embodiments, an anti-Tau antibody comprises a heavy chain variable region comprising the amino acid sequence of SEQ ID NO:596.

[0572] In some embodiments, an anti-Tau antibody comprises a heavy chain CDR1 sequence comprising the amino acid sequence of SEQ ID NO:433, a heavy chain CDR2 sequence comprising the amino acid sequence of SEQ ID NO:588, and a heavy chain CDR3 sequence comprising the amino acid sequence of SEQ ID NO:24. In some embodiments, an anti-Tau antibody comprises a heavy chain variable region comprising heavy chain CDR1-3 sequences of SEQ ID NOS:433, 588, and 24, respectively, and an amino acid sequence that has at least 90% sequence identity (e.g., at least 91%, at least 92%, at least 93%, at least 94%, at least 95%, at least 96%, at least 97%, at least 98%, or at least 99% sequence identity) to SEQ ID NO:597. In some embodiments, an anti-Tau antibody comprises a heavy chain variable region comprising the amino acid sequence of SEQ ID NO:597.

[0573] In some embodiments, an anti-Tau antibody comprises a heavy chain CDR1 sequence comprising the amino acid sequence of SEQ ID NO:434, a heavy chain CDR2 sequence comprising the amino acid sequence of SEQ ID NO:588, and a heavy chain CDR3 sequence comprising the amino acid sequence of SEQ ID NO:24. In some embodiments, an anti-Tau antibody comprises a heavy chain variable region comprising heavy chain CDR1-3 sequences of SEQ ID NOS:434, 588, and 24, respectively, and an amino acid sequence that has at least 90% sequence identity (e.g., at least 91%, at least 92%, at least 93%, at least 94%, at least 95%, at least 96%, at least 97%, at least 98%, or at least 99% sequence identity) to SEQ ID NO:598. In some embodiments, an anti-Tau antibody comprises a heavy chain variable region comprising the amino acid sequence of SEQ ID NO:598.

[0574] In some embodiments, an anti-Tau antibody comprises a heavy chain CDR1 sequence comprising the amino acid sequence of SEQ ID NO:435, a heavy chain CDR2 sequence comprising the amino acid sequence of SEQ ID NO:588, and a heavy chain CDR3 sequence comprising the amino acid sequence of SEQ ID NO:24. In some embodiments, an anti-Tau antibody comprises a heavy chain variable region comprising heavy chain CDR1-3 sequences of SEQ ID NOS:435, 588, and 24, respectively, and an amino acid sequence that has at least 90% sequence identity (e.g., at least 91%, at least 92%, at least 93%, at least 94%, at least 95%, at least 96%, at least 97%, at least 98%, or at least 99% sequence identity) to SEQ ID NO:599. In some embodiments, an anti-Tau antibody comprises a heavy chain variable region comprising the amino acid sequence of SEQ ID NO:599.

[0575] In some embodiments, an anti-Tau antibody comprises a heavy chain CDR1 sequence comprising the amino acid sequence of SEQ ID NO:436, a heavy chain CDR2 sequence comprising the amino acid sequence of SEQ ID NO:588, and a heavy chain CDR3 sequence comprising the amino acid sequence of SEQ ID NO:24. In some embodiments, an anti-Tau antibody comprises a heavy chain variable region comprising heavy chain CDR1-3 sequences of SEQ ID NOS:436, 588, and 24, respectively, and an amino acid sequence that has at least 90% sequence identity (e.g., at least 91%, at least 92%, at least 93%, at least 94%, at least 95%, at least 96%, at least 97%, at least 98%, or at least 99% sequence identity) to SEQ ID NO:600. In some embodiments, an anti-Tau antibody comprises a heavy chain variable region comprising the amino acid sequence of SEQ ID NO:600.

[0576] In some embodiments, an anti-Tau antibody comprises a heavy chain CDR1 sequence comprising the amino acid sequence of SEQ ID NO:437, a heavy chain CDR2 sequence comprising the amino acid sequence of SEQ ID NO:588, and a heavy chain CDR3 sequence comprising the amino acid sequence of SEQ ID NO:24. In some embodiments, an anti-Tau antibody comprises a heavy chain variable region comprising heavy chain CDR1-3 sequences of SEQ ID NOS:437, 588, and 24, respectively, and an amino acid sequence that has at least 90% sequence identity (e.g., at least 91%, at least 92%, at least 93%, at least 94%, at least 95%, at least 96%, at least 97%, at least 98%, or at least 99% sequence identity) to SEQ ID NO:601. In some embodiments, an anti-Tau antibody comprises a heavy chain variable region comprising the amino acid sequence of SEQ ID NO:601.

[0577] In some embodiments, an anti-Tau antibody comprises a heavy chain CDR1 sequence comprising the amino acid sequence of SEQ ID NO:586, a heavy chain CDR2 sequence comprising the amino acid sequence of SEQ ID NO:588, and a heavy chain CDR3 sequence comprising the amino acid sequence of SEQ ID NO:24. In some embodiments, an anti-Tau antibody comprises a heavy chain variable region comprising heavy chain CDR1-3 sequences of SEQ ID NOS:586, 588, and 24, respectively, and an amino acid sequence that has at least 90% sequence identity (e.g., at least 91%, at least 92%, at least 93%, at least 94%, at least 95%, at least 96%, at least 97%, at least 98%, or at least 99% sequence identity) to SEQ ID NO:602. In some embodiments, an anti-Tau antibody comprises a heavy chain variable region comprising the amino acid sequence of SEQ ID NO:602.

[0578] In some embodiments, an anti-Tau antibody comprises a heavy chain CDR1 sequence comprising the amino acid sequence of SEQ ID NO:587, a heavy chain CDR2 sequence comprising the amino acid sequence of SEQ ID NO:588, and a heavy chain CDR3 sequence comprising the amino acid sequence of SEQ ID NO:24. In some embodiments, an anti-Tau antibody comprises a heavy chain variable region comprising heavy chain CDR1-3 sequences of SEQ ID NOS:587, 588, and 24, respectively, and an amino acid sequence that has at least 90% sequence identity (e.g., at least 91%, at least 92%, at least 93%, at least 94%, at least 95%, at least 96%, at least 97%, at least 98%, or at least 99% sequence identity) to SEQ ID NO:603. In some embodiments, an anti-Tau antibody comprises a heavy chain variable region comprising the amino acid sequence of SEQ ID NO:603.

[0579] In some embodiments, an anti-Tau antibody comprises a light chain CDR1 sequence comprising the amino acid sequence of SEQ ID NO: 158, a light chain CDR2 sequence comprising the amino acid sequence of SEQ ID NO:27, and a light chain CDR3 sequence comprising the amino acid sequence of SEQ ID NO:28. In some embodiments, an anti-Tau antibody comprises a light chain variable region comprising light chain CDR1-3 sequences of SEQ ID NOS:158, 27, and 28, respectively, and an amino acid sequence that has at least 90% sequence identity (e.g., at least 91%, at least 92%, at least 93%, at least 94%, at least 95%, at least 96%, at least 97%, at least 98%, or at least 99% sequence identity) to SEQ ID NO:604. In some embodiments, an anti-Tau antibody comprises a light chain variable region comprising the amino acid sequence of SEQ ID NO:604.

[0580] In some embodiments, an anti-Tau antibody comprises a light chain CDR1 sequence comprising the amino acid sequence of SEQ ID NO:448, a light chain CDR2 sequence comprising the amino acid sequence of SEQ ID NO:27, and a light chain CDR3 sequence comprising the amino acid sequence of SEQ ID NO:28. In some embodiments, an anti-Tau antibody comprises a light chain variable region comprising light chain CDR1-3 sequences of SEQ ID NOS:448, 27, and 28, respectively, and an amino acid sequence that has at least 90% sequence identity (e.g., at least 91%, at least 92%, at least 93%, at least 94%, at least 95%, at least 96%, at least 97%, at least 98%, or at least 99% sequence identity) to SEQ ID NO:605. In some embodiments, an anti-Tau antibody comprises a light chain variable region comprising the amino acid sequence of SEQ ID NO:605.

[0581] In some embodiments, an anti-Tau antibody comprises a light chain CDR1 sequence comprising the amino acid sequence of SEQ ID NO:449, a light chain CDR2 sequence comprising the amino acid sequence of SEQ ID NO:27, and a light chain CDR3 sequence comprising the amino acid sequence of SEQ ID NO:28. In some embodiments, an anti-Tau antibody comprises a light chain variable region comprising light chain CDR1-3 sequences of SEQ ID NOS:449, 27, and 28, respectively, and an amino acid sequence that has at least 90% sequence identity (e.g., at least 91%, at least 92%, at least 93%, at least 94%, at least 95%, at least 96%, at least 97%, at least 98%, or at least 99% sequence identity) to SEQ ID NO:606. In some embodiments, an anti-Tau antibody comprises a light chain variable region comprising the amino acid sequence of SEQ ID NO:606.

[0582] In some embodiments, an anti-Tau antibody comprises a light chain CDR1 sequence comprising the amino acid sequence of SEQ ID NO:450, a light chain CDR2 sequence comprising the amino acid sequence of SEQ ID NO:27, and a light chain CDR3 sequence comprising the amino acid sequence of SEQ ID NO:28. In some embodiments, an anti-Tau antibody comprises a light chain variable region comprising light chain CDR1-3 sequences of SEQ ID NOS:450, 27, and 28, respectively, and an amino acid sequence that has at least 90% sequence identity (e.g., at least 91%, at least 92%, at least 93%, at least 94%, at least 95%, at least 96%, at least 97%, at least 98%, or at least 99% sequence identity) to SEQ ID NO:607. In some embodiments, an anti-Tau antibody comprises a light chain variable region comprising the amino acid sequence of SEQ ID NO:607.

[0583] In some embodiments, an anti-Tau antibody comprises a light chain CDR1 sequence comprising the amino acid sequence of SEQ ID NO:451, a light chain CDR2 sequence comprising the amino acid sequence of SEQ ID NO:27, and a light chain CDR3 sequence comprising the amino acid sequence of SEQ ID NO:28. In some embodiments, an anti-Tau antibody comprises a light chain variable region comprising light chain CDR1-3 sequences of SEQ ID NOS:451, 27, and 28, respectively, and an amino acid sequence that has at least 90% sequence identity (e.g., at least 91%, at least 92%, at least 93%, at least 94%, at least 95%, at least 96%, at least 97%, at least 98%, or at least 99% sequence identity) to SEQ ID NO:608. In some embodiments, an anti-Tau antibody comprises a light chain variable region comprising the amino acid sequence of SEQ ID NO:608.

[0584] In some embodiments, an anti-Tau antibody comprises a light chain CDR1 sequence comprising the amino acid sequence of SEQ ID NO:452, a light chain CDR2 sequence comprising the amino acid sequence of SEQ ID NO:27, and a light chain CDR3 sequence comprising the amino acid sequence of SEQ ID NO:28. In some embodiments, an anti-Tau antibody comprises a light chain variable region comprising light chain CDR1-3 sequences of SEQ ID NOS:452, 27, and 28, respectively, and an amino acid sequence that has at least 90% sequence identity (e.g., at least 91%, at least 92%, at least 93%, at least 94%, at least 95%, at least 96%, at least 97%, at least 98%, or at least 99% sequence identity) to SEQ ID NO:609. In some embodiments, an anti-Tau antibody comprises a light chain variable region comprising the amino acid sequence of SEQ ID NO:609.

[0585] In some embodiments, an anti-Tau antibody comprises a light chain CDR1 sequence comprising the amino acid sequence of SEQ ID NO:453, a light chain CDR2 sequence comprising the amino acid sequence of SEQ ID NO:27, and a light chain CDR3 sequence comprising the amino acid sequence of SEQ ID NO:28. In some embodiments, an anti-Tau antibody comprises a light chain variable region comprising light chain CDR1-3 sequences of SEQ ID NOS:453, 27, and 28, respectively, and an amino acid sequence that has at least 90% sequence identity (e.g., at least 91%, at least 92%, at least 93%, at least 94%, at least 95%, at least 96%, at least 97%, at least 98%, or at least 99% sequence identity) to SEQ ID NO:610. In some embodiments, an anti-Tau antibody comprises a light chain variable region comprising the amino acid sequence of SEQ ID NO:610.

[0586] In some embodiments, an anti-Tau antibody comprises a light chain CDR1 sequence comprising the amino acid sequence of SEQ ID NO:454, a light chain CDR2 sequence comprising the amino acid sequence of SEQ ID NO:27, and a light chain CDR3 sequence comprising the amino acid sequence of SEQ ID NO:28. In some embodiments, an anti-Tau antibody comprises a light chain variable region comprising light chain CDR1-3 sequences of SEQ ID NOS:454, 27, and 28, respectively, and an amino acid sequence that has at least 90% sequence identity (e.g., at least 91%, at least 92%, at least 93%, at least 94%, at least 95%, at least 96%, at least 97%, at least 98%, or at least 99% sequence identity) to SEQ ID NO:611. In some embodiments, an anti-Tau antibody comprises a light chain variable region comprising the amino acid sequence of SEQ ID NO:611.

[0587] In some embodiments, an anti-Tau antibody comprises a light chain CDR1 sequence comprising the amino acid sequence of SEQ ID NO:455, a light chain CDR2 sequence comprising the amino acid sequence of SEQ ID NO:27, and a light chain CDR3 sequence comprising the amino acid sequence of SEQ ID NO:28. In some embodiments, an anti-Tau antibody comprises a light chain variable region comprising light chain CDR1-3 sequences of SEQ ID NOS:455, 27, and 28, respectively, and an amino acid sequence that has at least 90% sequence identity (e.g., at least 91%, at least 92%, at least 93%, at least 94%, at least 95%, at least 96%, at least 97%, at least 98%, or at least 99% sequence identity) to SEQ ID NO:612. In some embodiments, an anti-Tau antibody comprises a light chain variable region comprising the amino acid sequence of SEQ ID NO:612.

[0588] In some embodiments, an anti-Tau antibody comprises a light chain CDR1 sequence comprising the amino acid sequence of SEQ ID NO:456, a light chain CDR2 sequence comprising the amino acid sequence of SEQ ID NO:27, and a light chain CDR3 sequence comprising the amino acid sequence of SEQ ID NO:28. In some embodiments, an anti-Tau antibody comprises a light chain variable region comprising light chain CDR1-3 sequences of SEQ ID NOS:456, 27, and 28, respectively, and an amino acid sequence that has at least 90% sequence identity (e.g., at least 91%, at least 92%, at least 93%, at least 94%, at least 95%, at least 96%, at least 97%, at least 98%, or at least 99% sequence identity) to SEQ ID NO:613. In some embodiments, an anti-Tau antibody comprises a light chain variable region comprising the amino acid sequence of SEQ ID NO:613.

[0589] In some embodiments, an anti-Tau antibody comprises a light chain CDR1 sequence comprising the amino acid sequence of SEQ ID NO:457, a light chain CDR2 sequence comprising the amino acid sequence of SEQ ID NO:27, and a light chain CDR3 sequence comprising the amino acid sequence of SEQ ID NO:28. In some embodiments, an anti-Tau antibody comprises a light chain variable region comprising light chain CDR1-3 sequences of SEQ ID NOS:457, 27, and 28, respectively, and an amino acid sequence that has at least 90% sequence identity (e.g., at least 91%, at least 92%, at least 93%, at least 94%, at least 95%, at least 96%, at least 97%, at least 98%, or at least 99% sequence identity) to SEQ ID NO:614. In some embodiments, an anti-Tau antibody comprises a light chain variable region comprising the amino acid sequence of SEQ ID NO:614.

[0590] In some embodiments, an anti-Tau antibody comprises a light chain CDR1 sequence comprising the amino acid sequence of SEQ ID NO:458, a light chain CDR2 sequence comprising the amino acid sequence of SEQ ID NO:27, and a light chain CDR3 sequence comprising the amino acid sequence of SEQ ID NO:28. In some embodiments, an anti-Tau antibody comprises a light chain variable region comprising light chain CDR1-3 sequences of SEQ ID NOS:458, 27, and 28, respectively, and an amino acid sequence that has at least 90% sequence identity (e.g., at least 91%, at least 92%, at least 93%, at least 94%, at least 95%, at least 96%, at least 97%, at least 98%, or at least 99% sequence identity) to SEQ ID NO:615. In some embodiments, an anti-Tau antibody comprises a light chain variable region comprising the amino acid sequence of SEQ ID NO:615.

[0591] In some embodiments, an anti-Tau antibody comprises a light chain CDR1 sequence comprising the amino acid sequence of SEQ ID NO: 158, a light chain CDR2 sequence comprising the amino acid sequence of SEQ ID NO:27, and a light chain CDR3 sequence comprising the amino acid sequence of SEQ ID NO:461. In some embodiments, an anti-Tau antibody comprises a light chain variable region comprising light chain CDR1-3 sequences of SEQ ID NOS:158, 27, and 461, respectively, and an amino acid sequence that has at least 90% sequence identity (e.g., at least 91%, at least 92%, at least 93%, at least 94%, at least 95%, at least 96%, at least 97%, at least 98%, or at least 99% sequence identity) to SEQ ID NO:616. In some embodiments, an anti-Tau antibody comprises a light chain variable region comprising the amino acid sequence of SEQ ID NO:616.

[0592] In some embodiments, an anti-Tau antibody comprises a light chain CDR1 sequence comprising the amino acid sequence of SEQ ID NO:450, a light chain CDR2 sequence comprising the amino acid sequence of SEQ ID NO:27, and a light chain CDR3 sequence comprising the amino acid sequence of SEQ ID NO:461. In some embodiments, an anti-Tau antibody comprises a light chain variable region comprising light chain CDR1-3 sequences of SEQ ID NOS:450, 27, and 461, respectively, and an amino acid sequence that has at least 90% sequence identity (e.g., at least 91%, at least 92%, at least 93%, at least 94%, at least 95%, at least 96%, at least 97%, at least 98%, or at least 99% sequence identity) to SEQ ID NO:463. In some embodiments, an anti-Tau antibody comprises a light chain variable region comprising the amino acid sequence of SEQ ID NO:463.

[0593] An anti-Tau antibody may comprise one or more CDRs selected from the group consisting of:
[0594] (a) a heavy chain CDR1 comprising the amino acid sequence of SEQ ID NO:586;
[0595] (b) a heavy chain CDR2 comprising the amino acid sequence of SEQ ID NO:588;
[0596] (c) a heavy chain CDR3 comprising the amino acid sequence of SEQ ID NOS:24;
[0597] (d) a light chain CDR1 comprising the amino acid sequence of SEQ ID NO:158;
[0598] (e) a light chain CDR2 comprising the amino acid sequence of SEQ ID NO:27; and
[0599] (f) a light chain CDR3 comprising the amino acid sequence of SEQ ID NO:28.

[0600] An anti-Tau antibody may comprise a heavy chain variable region comprising heavy chain CDR1-3 sequences of SEQ ID NOS:586, 588, and 24, respectively, and an amino acid sequence that has at least 90% sequence identity (e.g., at least 91%, at least 92%, at least 93%, at least 94%, at least 95%, at least 96%, at least 97%, at least 98%, or at least 99% sequence identity) to the sequence of SEQ ID NO:602 and further comprise a light chain variable region comprising light chain CDR1-3 sequences of SEQ ID NOS:158, 27, and 28, respectively, and an amino acid sequence that has at least 90% sequence identity (e.g., at least 91%, at least 92%, at least 93%, at least 94%, at least 95%, at least 96%, at least 97%, at least 98%, or at least 99% sequence identity) to the sequence of SEQ ID NO:604. In some embodiments, an anti-Tau antibody comprises a heavy chain variable region comprising the amino acid sequence of SEQ ID NO:602 and further comprises a light chain variable region comprising the amino acid sequence of SEQ ID NO:604.

[0601] An anti-Tau antibody may comprise one or more CDRs selected from the group consisting of:
[0602] (a) a heavy chain CDR1 comprising the amino acid sequence of SEQ ID NO:586;
[0603] (b) a heavy chain CDR2 comprising the amino acid sequence of SEQ ID NO:588;
[0604] (c) a heavy chain CDR3 comprising the amino acid sequence of SEQ ID NOS:24;
[0605] (d) a light chain CDR1 comprising the amino acid sequence of SEQ ID NO: 158;
[0606] (e) a light chain CDR2 comprising the amino acid sequence of SEQ ID NO:27; and
[0607] (f) a light chain CDR3 comprising the amino acid sequence of SEQ ID NO:461.

[0608] An anti-Tau antibody may comprise a heavy chain variable region comprising heavy chain CDR1-3 sequences of SEQ ID NOS:586, 588, and 24, respectively, and an amino acid sequence that has at least 90% sequence identity (e.g., at least 91%, at least 92%, at least 93%, at least 94%, at least 95%, at least 96%, at least 97%, at least 98%, or at least 99% sequence identity) to the sequence of SEQ ID NO:602 and further comprise a light chain variable region comprising light chain CDR1-3 sequences of SEQ ID NOS:158, 27, and 461, respectively, and an amino acid sequence that has at least 90% sequence identity (e.g., at least 91%, at least 92%, at least 93%, at least 94%, at least 95%, at least 96%, at least 97%, at least 98%, or at least 99% sequence identity) to the sequence of SEQ ID NO:616. In some embodiments, an anti-Tau antibody comprises a heavy chain variable region comprising the amino acid sequence of SEQ ID NO:602 and further comprises a light chain variable region comprising the amino acid sequence of SEQ ID NO:616.

[0609] An anti-Tau antibody may comprise one or more CDRs selected from the group consisting of:
[0610] (a) a heavy chain CDR1 comprising the amino acid sequence of SEQ ID NO:586;
[0611] (b) a heavy chain CDR2 comprising the amino acid sequence of SEQ ID NO:588;
[0612] (c) a heavy chain CDR3 comprising the amino acid sequence of SEQ ID NOS:24;
[0613] (d) a light chain CDR1 comprising the amino acid sequence of SEQ ID NO:450;
[0614] (e) a light chain CDR2 comprising the amino acid sequence of SEQ ID NO:27; and
[0615] (f) a light chain CDR3 comprising the amino acid sequence of SEQ ID NO:461.

[0616] An anti-Tau antibody may comprise a heavy chain variable region comprising heavy chain CDR1-3 sequences of SEQ ID NOS:586, 588, and 24, respectively, and an amino acid sequence that has at least 90% sequence identity (e.g., at least 91%, at least 92%, at least 93%, at least 94%, at least 95%, at least 96%, at least 97%, at least 98%, or at least 99% sequence identity) to the sequence of SEQ ID NO:602 and further comprise a light chain variable region comprising light chain CDR1-3 sequences of SEQ ID NOS:450, 27, and 461, respectively, and an amino acid sequence that has at least 90% sequence identity (e.g., at least 91%, at least 92%, at least 93%, at least 94%, at least 95%, at least 96%, at least 97%, at least 98%, or at least 99% sequence identity) to the sequence of SEQ ID NO:463. In some embodiments, an anti-Tau antibody comprises a heavy chain variable region comprising the amino acid sequence of SEQ ID NO:602 and further comprises a light chain variable region comprising the amino acid sequence of SEQ ID NO:463.

[0617] An anti-Tau antibody may comprise one or more CDRs selected from the group consisting of:
[0618] (a) a heavy chain CDR1 comprising the amino acid sequence of SEQ ID NO:587;
[0619] (b) a heavy chain CDR2 comprising the amino acid sequence of SEQ ID NO:588;
[0620] (c) a heavy chain CDR3 comprising the amino acid sequence of SEQ ID NOS:24;
[0621] (d) a light chain CDR1 comprising the amino acid sequence of SEQ ID NO:158;
[0622] (e) a light chain CDR2 comprising the amino acid sequence of SEQ ID NO:27; and
[0623] (f) a light chain CDR3 comprising the amino acid sequence of SEQ ID NO:28.

[0624] An anti-Tau antibody may comprise a heavy chain variable region comprising heavy chain CDR1-3 sequences of SEQ ID NOS:587, 588, and 24, respectively, and an amino acid sequence that has at least 90% sequence identity (e.g., at least 91%, at least 92%, at least 93%, at least 94%, at least 95%, at least 96%, at least 97%, at least 98%, or at least 99% sequence identity) to the sequence of SEQ ID NO:603 and further comprise a light chain variable region comprising light chain CDR1-3 sequences of SEQ ID NOS:158, 27, and 28, respectively, and an amino acid sequence that has at least 90% sequence identity (e.g., at least 91%, at least 92%, at least 93%, at least 94%, at least 95%, at least 96%, at least 97%, at least 98%, or at least 99% sequence identity) to the sequence of SEQ ID NO:604. In some embodiments, an anti-Tau antibody comprises a heavy chain variable region comprising the amino acid sequence of SEQ ID NO:603 and further comprises a light chain variable region comprising the amino acid sequence of SEQ ID NO:604.

[0625] An anti-Tau antibody may comprise one or more CDRs selected from the group consisting of:
[0626] (a) a heavy chain CDR1 comprising the amino acid sequence of SEQ ID NO:587;
[0627] (b) a heavy chain CDR2 comprising the amino acid sequence of SEQ ID NO:588;
[0628] (c) a heavy chain CDR3 comprising the amino acid sequence of SEQ ID NOS:24;
[0629] (d) a light chain CDR1 comprising the amino acid sequence of SEQ ID NO:158;
[0630] (e) a light chain CDR2 comprising the amino acid sequence of SEQ ID NO:27; and
[0631] (f) a light chain CDR3 comprising the amino acid sequence of SEQ ID NO:461.

[0632] An anti-Tau antibody may comprise a heavy chain variable region comprising heavy chain CDR1-3 sequences of SEQ ID NOS:587, 588, and 24, respectively, and an amino acid sequence that has at least 90% sequence identity (e.g., at least 91%, at least 92%, at least 93%, at least 94%, at least 95%, at least 96%, at least 97%, at least 98%, or at least 99% sequence identity) to the sequence of SEQ ID NO:603 and further comprise a light chain variable region comprising light chain CDR1-3 sequences of SEQ ID NOS:158, 27, and 461, respectively, and an amino acid sequence that has at least 90% sequence identity (e.g., at least 91%, at least 92%, at least 93%, at least 94%, at least 95%, at least 96%, at least 97%, at least 98%, or at least 99% sequence identity) to the sequence of SEQ ID NO:616. In some embodiments, an anti-Tau antibody comprises a heavy chain variable region comprising the amino acid sequence of SEQ ID NO:603 and further comprises a light chain variable region comprising the amino acid sequence of SEQ ID NO:616.

[0633] An anti-Tau antibody may comprise one or more CDRs selected from the group consisting of:
[0634] (a) a heavy chain CDR1 comprising the amino acid sequence of SEQ ID NO:587;
[0635] (b) a heavy chain CDR2 comprising the amino acid sequence of SEQ ID NO:588;
[0636] (c) a heavy chain CDR3 comprising the amino acid sequence of SEQ ID NOS:24;
[0637] (d) a light chain CDR1 comprising the amino acid sequence of SEQ ID NO:450;
[0638] (e) a light chain CDR2 comprising the amino acid sequence of SEQ ID NO:27; and
[0639] (f) a light chain CDR3 comprising the amino acid sequence of SEQ ID NO:461.

[0640] An anti-Tau antibody may comprise a heavy chain variable region comprising heavy chain CDR1-3 sequences of SEQ ID NOS:587, 588, and 24, respectively, and an amino acid sequence that has at least 90% sequence identity (e.g., at least 91%, at least 92%, at least 93%, at least 94%, at least 95%, at least 96%, at least 97%, at least 98%, or at least 99% sequence identity) to the sequence of SEQ ID NO:603 and further comprise a light chain variable region comprising light chain CDR1-3 sequences of SEQ ID NOS:450, 27, and 461, respectively, and an amino acid sequence that has at least 90% sequence identity (e.g., at least 91%, at least 92%, at least 93%, at least 94%, at least 95%, at least 96%, at least 97%, at least 98%, or at least 99% sequence identity) to the sequence of SEQ ID NO:463. In some embodiments, an anti-Tau antibody comprises a heavy chain variable region comprising the amino acid sequence of SEQ ID NO:603 and further comprises a light chain variable region comprising the amino acid sequence of SEQ ID NO:463.

[0641] In some embodiments, an anti-Tau antibody comprises one or more consensus sequences. Consensus sequences can be identified by aligning heavy chain or light chain sequences (e.g., CDRs) for antibodies that bind to the same or similar (e.g., overlapping) epitopes to determine conserved amino acids or motifs (i.e., where alteration in sequences may alter protein function) and regions where variation occurs in alignment of sequences (i.e., where variation of sequence is not likely to significantly affect protein function). In some embodiments, one or more consensus sequences can be identified for antibodies that recognize the same or similar epitope as 1C7. Exemplary hulC7.v2-like consensus sequences include SEQ ID NOS: 163-166 and 465-468. In the consensus sequences of SEQ ID NOS: 163-166, 465-468, and 617-624, each “X” represents an amino acid residue that is not absolutely conserved among the aligned sequences (e.g., aligned CDR sequences). It will be appreciated that when selecting an amino acid to insert at a position marked by an “X” that in some embodiments, the amino acid is selected from those amino acids found at the corresponding position in the aligned sequences.

[0642] In some embodiments, the antibody comprises a heavy chain CDR1 sequence having the consensus sequence X₁X₂X₃X₄X₅X₆X₇GX₈S (SEQ ID NO: 163), wherein X₁ is G or V; X₂ is F or I; X₃ is T, K, or R; X₄ is F or W; X₅ is S or R; X₆ is S, R, G, or I; X₇ is Y, V, or P; and X₈ is M, V, or T. In some embodiments, the heavy chain CDR1 consensus sequence comprises the sequence GFTFSSYGMS (SEQ ID NO:22); GFKFSRVGVS (SEQ ID NO:150); GFTFSRVGTS (SEQ ID NO:151); GFRFSRVGMS (SEQ ID NO:152); GFRFSGPGMS (SEQ ID NO:153); or VIKWRIYGMS (SEQ ID NO:154).

[0643] In some embodiments, the antibody comprises a heavy chain CDR1 sequence having the consensus sequence GFX₁FSX₂X₃GX₄S (SEQ ID NO:465), wherein X₁ is T, K, R, Q, or M; X₂ is S, R, Q, M, L, K, G, or, S; X₃ is Y, V, or P; and X₄ is M, V, or T. In some embodiments, the antibody comprises a heavy chain CDR1 sequence having the consensus sequence X₁X₂X₃X₄X₅X₆X₇GX₈S (SEQ ID NO:617), wherein X₁ is G or V; X₂ is F or I; X₃ is T, K, R, Q, or M; X₄ is F or W; X₅ is S or R; X₆ is S, R, G, I, Q, M, L, or K; X₇ is Y, V, or P; and X₈ is M, V, or T. In some embodiments, the antibody comprises a heavy chain CDR1 sequence having the consensus sequence X₁X₂X₃X₄X₅X₆X₇X₈X₉X₁₀ (SEQ ID NO:620), wherein X₁ is G, V, or R; X₂ is F or I; X₃ is T, K, R, Q, M, or N; X₄ is F, W, or I; X₅ is S, R, E, or K; X₆ is S, R, G, I, Q, M, L, K, or D; X₇ is Y, V, P, or D; X₈ is G or Y; X₉ is M, V, or T; and X₁₀ is S or H. In some embodiments, the heavy chain CDR1 consensus sequence comprises the sequence of any one of SEQ ID NOS:22, 150-154, 420-437, 586, and 587.

[0644] In some embodiments, the antibody comprises a heavy chain CDR2 sequence having the consensus sequence SISGX₁X₂GSYIHYAX₃X₄VK (SEQ ID NO:466), wherein X₁ is D, E, T, or S; X₂ is G or A; and X₃ is D or S; X₄ is S or A. In some embodiments, the antibody comprises a heavy chain CDR2 sequence having the consensus sequence SISGX₁X₂GSYIX₃YAX₄X₅VK (SEQ ID NO:621), wherein X₁ is D, E, T, or S; X₂ is G or A; X₃ is H or R; X₄ is D or S; and X₅ is S or A. In some embodiments, the heavy chain CDR2 consensus sequence comprises the sequence of any one of SEQ ID NOS:23 and 438-443.

[0645] In some embodiments, the antibody comprises a heavy chain CDR3 sequence having the consensus sequence AX₁LPX₂ (SEQ ID NO: 164), wherein X₁ is R or K; and X₂ is Y or F. In some embodiments, the antibody comprises a heavy chain CDR3 sequence having the consensus sequence X₁X₂LX₃X₄ (SEQ ID NO:622), wherein X₁ is A, T, or N; X₂ is R, K, or T; X₃ is P or R; and X₄ is Y or F. In some embodiments, the heavy chain CDR3 consensus sequence comprises the sequence ARLPY (SEQ ID NO:24) or AKLPF (SEQ ID NO:155).

[0646] In some embodiments, the antibody comprises a light chain CDR1 sequence having the consensus sequence KSSX₁SLX₂X₃SX₄X₅X₆X₇X₈YLX₉ (SEQ ID NO: 165), wherein X₁ is Q or H; X₂ is L, Y, or H; X₃ is N, S, or R; X₄ is G or R; X₅ is N, R, K, or T; X₆ is Q, H, or R; X₇ is K or Q; X₈ is N, H, or D; and X₉ is N, T, V. In some embodiments, the light chain CDR1 consensus sequence comprises the sequence KSSQSLLNSGNQKNYLT (SEQ ID NO:26), KSSHSLYSSRRHKHYLA (SEQ ID NO: 156), KSSQSLLRSGKRQNYLV (SEQ ID NO: 157), or KSSQSLHRSGTQKDYLV (SEQ ID NO:158).

[0647] In some embodiments, the antibody comprises a light chain CDR1 sequence having the consensus sequence KSSQSLX₁X₂X₃GX₄QKX₅YLX₆ (SEQ ID NO:467), wherein X₁ is L, H, or V; X₂ is N, Y, S, Q, R, M, K, or L; X₃ is S or A; X₄ is T or N; X₅ is N or D; X₆ is T, V, or A. In some embodiments, the antibody comprises a light chain CDR1 sequence having the consensus sequence KSSX₁SLX₂X₃X₄X₅X₆X₇X₈X₉YLX₁₀ (SEQ ID NO:618), wherein X₁ is Q or H; X₂ is L, Y, H, or V; X₃ is N, S, R, Y, Q, M, K, or L; X₄ is S or A; X₅ is G or R; X₆ is N, R, K, or T; X₇ is Q, H, or R; X₈ is K or Q; X₉ is N, H, or D; and X₁₀ is T, A, or V. In some embodiments, the light chain CDR1 consensus sequence comprises the sequence of SEQ ID NOS:444-459.

[0648] In some embodiments, the antibody comprises a light chain CDR2 sequence having the consensus sequence X₁X₂SX₃X₄X₅X₆(SEQ ID NO:623), wherein X₁ is S, W, R, or L; X₂ is A, M, or V; X₃ is Y, T, F, N, or K; X₄ is R, L, or K; X₅ is Y, H, A, or E; and X₆ is S or T.

[0649] In some embodiments, the antibody comprises a light chain CDR3 sequence having the consensus sequence QX₁YX₂X₃YPX₄T (SEQ ID NO: 166), wherein X₁ is Q, K, or H; X₂ is N, D, or R; X₃ is S or T; and X₄ is L or M. In some embodiments, the light chain CDR3 consensus sequence comprises the sequence QQYNSYPLT (SEQ ID NO:28), QKYNSYPLT (SEQ ID NO:159), QKYDSYPLT (SEQ ID NO:160), QHYRTYPLT (SEQ ID NO:161), or QHYRSYPMT (SEQ ID NO: 162).

[0650] In some embodiments, the antibody comprises a light chain CDR3 sequence having the consensus sequence QQYX₁X₂YPLT (SEQ ID NO:468), wherein X₁ is N, Y, or S; X₂ is S or A. In some embodiments, the antibody comprises a light chain CDR3 sequence having the consensus sequence QX₁YX₂X₃YPX₄T (SEQ ID NO:619), wherein X₁ is Q, K, or H; X₂ is N, D, R, Y, or S; X₃ is S, T, or A; and X₄ is L or M. In some embodiments, the antibody comprises a light chain CDR3 sequence having the consensus sequence X₁X₂X₃X₄X₅X₆PX₇T (SEQ ID NO:624), wherein X₁ is Q, A, V, or P; X₂ is Q, K, H, or L; X₃ is Y, M, G, or S; X₄ is N, D, R, Y, S, L, or T; X₅ is S, T, A, E, or H; X₆ is Y, R, F, or D; and X₇ is L, M, or Y. In some embodiments, the light chain CDR3 consensus sequence comprises the sequence of any one of SEQ ID NOS:460-462.

### Preparation of Antibodies

[0651] For preparing an anti-Tau antibody, many techniques known in the art can be used. In some embodiments, antibodies are prepared by immunizing an animal or animals (e.g., mice, rabbits, or rats) with an antigen or a mixture of antigens for the induction of an antibody response. In some embodiments, the antigen or mixture of antigens is administered in conjugation with an adjuvant (e.g., Freund's adjuvant). After an initial immunization, one or more subsequent booster injections of the antigen or antigens may be administered to improve antibody production. Following immunization, antigen-specific B cells are harvested, e.g., from the spleen and/or lymphoid tissue. Methods of preparing antibodies are described in the Examples section below. In some embodiments, a method of preparing an anti-Tau antibody comprises immunizing an animal with a mixture of antigens, wherein the mixture of antigens comprises an unphosphorylated Tau (e.g., recombinant human Tau) and a phosphorylated Tau (e.g., a phosphorylated human Tau).

[0652] The genes encoding the heavy and light chains of an antibody of interest can be cloned from a cell, e.g., the genes encoding a monoclonal antibody can be cloned from a hybridoma and used to produce a recombinant monoclonal antibody. Gene libraries encoding heavy and light chains of monoclonal antibodies can also be made from hybridoma or plasma cells. Alternatively, phage or yeast display technology can be used to identify antibodies and Fab fragments that specifically bind to selected antigens. Techniques for the production of single chain antibodies or recombinant antibodies can also be adapted to produce antibodies. Antibodies can also be made bispecific, i.e., able to recognize two different antigens. Antibodies can also be heteroconjugates, e.g., two covalently joined antibodies, or immunotoxins.

[0653] Antibodies can be produced using any number of expression systems, including prokaryotic and eukaryotic expression systems. In some embodiments, the expression system is a mammalian cell expression, such as a hybridoma, or a CHO cell expression system. Many such systems are widely available from commercial suppliers. In embodiments in which an antibody comprises both a VH and VL region, the VH and VL regions may be expressed using a single vector, e.g., in a di-cistronic expression unit, or under the control of different promoters. In other embodiments, the VH and VL region may be expressed using separate vectors. A VH or VL region as described herein may optionally comprise a methionine at the N-terminus. Methods of generating and screening hybridoma cell lines, including the selection and immunization of suitable animals, the isolation and fusion of appropriate cells to create the hybridomas, the screening of hybridomas for the secretion of desired antibodies, and characterization of the antibodies are known to one of ordinary skill in the art. Non-limiting examples are also described in Example 6 herein. In some embodiments, the hybridoma cell line produces (e.g., secretes) an anti-Tau antibody of the present invention (e.g., anti-Tau antibody 17G2.A1, 19F7.C9, or 24D2.B2).

[0654] In some embodiments, the antibody is a chimeric antibody. Methods for making chimeric antibodies are known in the art. For example, chimeric antibodies can be made in which the antigen-binding region (heavy chain variable region and light chain variable region) from one species, such as a mouse, is fused to the effector region (constant domain) of another species, such as a human. As another example, “class switched” chimeric antibodies can be made in which the effector region of an antibody is substituted with an effector region of a different immunoglobulin class or subclass.

[0655] In some embodiments, the antibody is a humanized antibody. Generally, a non-human antibody is humanized in order to reduce its immunogenicity. Humanized antibodies typically comprise one or more variable regions (e.g., CDRs) or portions thereof that are non-human (e.g., derived from a mouse variable region sequence), and possibly some framework regions or portions thereof that are non-human, and further comprise one or more constant regions that are derived from human antibody sequences. Methods for humanizing non-human antibodies are known in the art. Transgenic mice, or other organisms such as other mammals, can be used to express humanized or human antibodies. Other methods of humanizing antibodies include, for example, variable region resurfacing, CDR grafting, grafting specificity-determining residues (SDR), guided selection, and framework shuffling.

[0656] As an alternative to humanization, fully human antibodies can be generated. As a non-limiting example, transgenic animals (e.g., mice) can be produced that are capable, upon immunization, of producing a full repertoire of human antibodies in the absence of endogenous immunoglobulin production. For example, it has been described that the homozygous deletion of the antibody heavy-chain joining region (JH) gene in chimeric and germ-line mutant mice results in complete inhibition of endogenous antibody production. Transfer of the human germ-line immunoglobulin gene array in such germ-line mutant mice will result in the production of human antibodies upon antigen challenge. As another example, human antibodies can be produced by hybridoma-based methods, such as by using primary human B cells for generating cell lines producing human monoclonal antibodies.

[0657] Human antibodies can also be produced using phage display or yeast display technology. In phage display, repertoires of variable heavy chain and variable light chain genes are amplified and expressed in phage display vectors. In some embodiments, the antibody library is a natural repertoire amplified from a human source. In some embodiments, the antibody library is a synthetic library made by cloning heavy chain and light chain sequences and recombining to generate a large pool of antibodies with different antigenic specificity. Phage typically display antibody fragments (e.g., Fab fragments or scFv fragments), which are then screened for binding to an antigen of interest.

[0658] In some embodiments, antibody fragments (such as a Fab, a Fab′, a F(ab′)₂, a scFv, a VH, a V_{HH}, or a diabody) are generated. Various techniques have been developed for the production of antibody fragments. Traditionally, these fragments were derived via proteolytic digestion of intact antibodies. However, these fragments can now be produced directly using recombinant host cells. For example, antibody fragments can be isolated from antibody phage libraries. Alternatively, Fab′-SH fragments can be directly recovered from E. coli cells and chemically coupled to form F(ab′)₂ fragments. According to another approach, F(ab′)₂ fragments can be isolated directly from recombinant host cell culture. Other techniques for the production of antibody fragments will be apparent to those skilled in the art.

[0659] In some embodiments, the antibody or an antibody fragment is conjugated to another molecule, e.g., polyethylene glycol (PEGylation) or serum albumin, to provide an extended half-life in vivo.

### Multispecific Antibodies

[0660] In some embodiments, multispecific antibodies comprising an anti-Tau antibody (or antigen-binding portion thereof) as described herein are provided, e.g., a bispecific antibody. In some embodiments, a multispecific antibody (e.g., a bispecific antibody) has a variable region that has a binding specificity for Tau and another variable region that has a binding specificity for at least one other antigen. In some embodiments, a multispecific antibody (e.g., a bispecific antibody) binds to two different epitopes of Tau.

[0661] In some embodiments, an anti-Tau antibody comprises:

[0662] (a) a first antigen-binding portion comprising a first variable region that specifically binds to a Tau protein (e.g., a human Tau protein), wherein the first antigen-binding portion comprises (i) a first heavy chain comprising a first Fc polypeptide and (ii) a first light chain; and

[0663] (b) a second antigen-binding portion comprising a second variable region that specifically binds to the Tau protein (e.g., the human Tau protein), wherein the second antigen-binding portion comprises (i) a second heavy chain comprising a second Fc polypeptide and (ii) a second light chain, wherein the first Fc polypeptide and the second Fc polypeptide form an Fc dimer. In some embodiments, the first Fc polypeptide is a modified Fc polypeptide and/or the second Fc polypeptide is a modified Fc polypeptide.

[0664] In some embodiments, an anti-Tau antibody comprises:

[0665] (a) a first antigen-binding portion comprising a first variable region that specifically binds to a Tau protein (e.g., a human Tau protein), wherein the first antigen-binding portion comprises (i) a first heavy chain comprising a first Fc polypeptide and (ii) a first light chain; and

[0666] (b) a second antigen-binding portion comprising a second variable region that specifically binds to the Tau protein (e.g., the human Tau protein), wherein the second antigen-binding portion comprises (i) a second heavy chain comprising a second Fc polypeptide and (ii) a second light chain, wherein the first Fc polypeptide and the second Fc polypeptide form an Fc dimer and wherein the first Fc polypeptide is a modified Fc polypeptide and/or the second Fc polypeptide is a modified Fc polypeptide.

[0667] In some embodiments, the first and second variable regions recognize the same epitope in the Tau protein. In some embodiments, the first and second variable regions recognize different epitopes in the Tau protein.

[0668] Methods for making multispecific antibodies include, but are not limited to, recombinant co-expression of two pairs of heavy chain and light chain in a host cell, “knobs-into-holes” engineering, “diabody” technology, intramolecular trimerization, and fusion of an antibody fragment to the N-terminus or C-terminus of another antibody, e.g., tandem variable domains.

### Nucleic Acids, Vectors, and Host Cells

[0669] In some embodiments, the anti-Tau antibodies as described herein are prepared using recombinant methods. Accordingly, in some aspects, the invention provides isolated nucleic acids comprising a nucleic acid sequence encoding any of the anti-Tau antibodies as described herein (e.g., any one or more of the CDRs, heavy chain variable regions, and light chain variable regions described herein); vectors comprising such nucleic acids; and host cells into which the nucleic acids are introduced that are used to replicate the antibody-encoding nucleic acids and/or to express the antibodies.

[0670] In some embodiments, a polynucleotide (e.g., an isolated polynucleotide) comprises a nucleotide sequence encoding an antibody or antigen-binding portion thereof as described herein (e.g., as described in the Section above entitled “Anti-Tau Antibody Sequences”). In some embodiments, the polynucleotide comprises a nucleotide sequence encoding one or more amino acid sequences (e.g., CDR, heavy chain, light chain, and/or framework regions) disclosed in the Sequence Listing. In some embodiments, the polynucleotide comprises a nucleotide sequence encoding an amino acid sequence having at least 85% sequence identity (e.g., at least 85%, at least 90%, at least 91%, at least 92%, at least 93%, at least 94%, at least 95%, at least 96%, at least 97%, at least 98%, or at least 99% sequence identity) to a sequence (e.g., a CDR, heavy chain, light chain, or framework region sequence) disclosed in the Sequence Listing. In some embodiments, a polynucleotide as described herein is operably linked to a heterologous nucleic acid, e.g., a heterologous promoter.

[0671] Suitable vectors containing polynucleotides encoding antibodies of the present disclosure, or fragments thereof, include cloning vectors and expression vectors. While the cloning vector selected may vary according to the host cell intended to be used, useful cloning vectors generally have the ability to self-replicate, may possess a single target for a particular restriction endonuclease, and/or may carry genes for a marker that can be used in selecting clones containing the vector. Examples include plasmids and bacterial viruses, e.g., pUC18, pUC19, Bluescript (e.g., pBS SK+) and its derivatives, mpl8, mpl9, pBR322, pMB9, ColE1, pCR1, RP4, phage DNAs, and shuttle vectors such as pSA3 and pAT28. These and many other cloning vectors are available from commercial vendors such as BioRad, Strategene, and Invitrogen.

[0672] Expression vectors generally are replicable polynucleotide constructs that contain a nucleic acid of the present disclosure. The expression vector may replicate in the host cells either as episomes or as an integral part of the chromosomal DNA. Suitable expression vectors include but are not limited to plasmids, viral vectors, including adenoviruses, adeno-associated viruses, retroviruses, and any other vector.

[0673] Suitable host cells for cloning or expressing a polynucleotide or vector as described herein include prokaryotic or eukaryotic cells. In some embodiments, the host cell is prokaryotic. In some embodiments, the host cell is eukaryotic, e.g., Chinese Hamster Ovary (CHO) cells or lymphoid cells. In some embodiments, the host cell is a human cell, e.g., a Human Embryonic Kidney (HEK) cell.

[0674] In a further aspect, methods of making an anti-Tau antibody as described herein are provided. In some embodiments, the method includes culturing a host cell as described herein (e.g., a host cell expressing a polynucleotide or vector as described herein) under conditions suitable for expression of the antibody. In some embodiments, the antibody is subsequently recovered from the host cell (or host cell culture medium).

### IV. Fc Polypeptide Modifications for Blood-Brain Barrier (BBB) Receptor Binding

[0675] In some aspects, provided herein are anti-Tau antibodies that are capable of being transported across the blood-brain barrier (BBB). Such an antibody comprises a modified Fc polypeptide that binds to a BBB receptor. BBB receptors are expressed on BBB endothelia, as well as other cell and tissue types. In some embodiments, the BBB receptor is transferrin receptor (TfR).

[0676] Amino acid residues designated in various Fc modifications, including those introduced in a modified Fc polypeptide that binds to a BBB receptor, e.g., TfR, are numbered herein using EU index numbering. Any Fc polypeptide, e.g., an IgG1, IgG2, IgG3, or IgG4 Fc polypeptide, may have modifications, e.g., amino acid substitutions, in one or more positions as described herein.

[0677] In some embodiments, an anti-Tau antibody comprises a first and optionally a second Fc polypeptide, each of which can be independently modified. In some embodiments, modifications (e.g., that promote TfR binding) that are made to the first and/or second Fc polypeptides result in an increase in brain uptake of the antibody (or antigen-binding portion thereof) that is increased by at least about 2-fold, 3-fold, 4-fold, 5-fold, 6-fold, 7-fold, 8-fold, 9-fold, 10-fold, 11-fold, 12-fold, 13-fold, 14-fold, 15-fold, 16-fold, 17-fold, 18-fold, 19-fold, 20-fold, or more, compared to the uptake without the modifications having been made.

[0678] A modified (e.g., enhancing heterodimerization and/or BBB receptor-binding) Fc polypeptide present in an anti-Tau antibody of the invention can have at least 70% identity, at least 75% identity, at least 80% identity, at least 85% identity, at least 90% identity, or at least 95% identity to a native Fc region sequence or a fragment thereof, e.g., a fragment of at least 50 amino acids or at least 100 amino acids, or greater in length. In some embodiments, the native Fc amino acid sequence is the Fc region sequence of SEQ ID NO:181. In some embodiments, the modified Fc polypeptide has at least 70% identity, at least 75% identity, at least 80% identity, at least 85% identity, at least 90% identity, or at least 95% identity to amino acids 1-110 of SEQ ID NO:181, or to amino acids 111-217 of SEQ ID NO:181, or a fragment thereof, e.g., a fragment of at least 50 amino acids or at least 100 amino acids, or greater in length.

[0679] In some embodiments, a modified (e.g., enhancing heterodimerization and/or BBB receptor-binding) Fc polypeptide comprises at least 50 amino acids, or at least 60, 65, 70, 75, 80, 85, 90, or 95 or more, or at least 100 amino acids, or more, that correspond to a native Fc region amino acid sequence. In some embodiments, the modified Fc polypeptide comprises at least 25 contiguous amino acids, or at least 30, 35, 40, or 45 contiguous amino acids, or 50 contiguous amino acids, or at least 60, 65, 70, 75, 80 85, 90, or 95 or more contiguous amino acids, or 100 or more contiguous amino acids, that correspond to a native Fc region amino acid sequence, such as SEQ ID NO:181.

[0680] In some embodiments, the domain that is modified for BBB receptor-binding activity is a human Ig CH3 domain, such as an IgG1 CH3 domain. The CH3 domain can be of any IgG subtype, i.e., from IgG1, IgG2, IgG3, or IgG4. In the context of IgG1 antibodies, a CH3 domain refers to the segment of amino acids from about position 341 to about position 447 as numbered according to the EU numbering scheme.

[0681] In some embodiments, the domain that is modified for BBB receptor-binding activity is a human Ig CH2 domain, such as an IgG CH2 domain. The CH2 domain can be of any IgG subtype, i.e., from IgG1, IgG2, IgG3, or IgG4. In the context of IgG1 antibodies, a CH2 domain refers to the segment of amino acids from about position 231 to about position 340 as numbered according to the EU numbering scheme.

[0682] In some embodiments, a modified (e.g., BBB receptor-binding) Fc polypeptide present in an anti-Tau antibody of the invention comprises at least one, two, or three substitutions; and in some embodiments, at least four five, six, seven, eight, nine, or ten substitutions at amino acid positions comprising 266, 267, 268, 269, 270, 271, 295, 297, 298, and 299, according to the EU numbering scheme.

[0683] In some embodiments, a modified (e.g., BBB receptor-binding) Fc polypeptide present in an anti-Tau antibody of the invention comprises at least one, two, or three substitutions; and in some embodiments, at least four, five, six, seven, eight, or nine substitutions at amino acid positions comprising 274, 276, 283, 285, 286, 287, 288, 289, and 290, according to the EU numbering scheme.

[0684] In some embodiments, a modified (e.g., BBB receptor-binding) Fc polypeptide present in an anti-Tau antibody of the invention comprises at least one, two, or three substitutions; and in some embodiments, at least four, five, six, seven, eight, nine, or ten substitutions at amino acid positions comprising 268, 269, 270, 271, 272, 292, 293, 294, 296, and 300, according to the EU numbering scheme.

[0685] In some embodiments, a modified (e.g., BBB receptor-binding) Fc polypeptide present in an anti-Tau antibody of the invention comprises at least one, two, or three substitutions; and in some embodiments, at least four, five, six, seven, eight, or nine substitutions at amino acid positions comprising 272, 274, 276, 322, 324, 326, 329, 330, and 331, according to the EU numbering scheme.

[0686] In some embodiments, a modified (e.g., BBB receptor-binding) Fc polypeptide present in an anti-Tau antibody of the invention comprises at least one, two, or three substitutions; and in some embodiments, at least four, five, six, or seven substitutions at amino acid positions comprising 345, 346, 347, 349, 437, 438, 439, and 440, according to the EU numbering scheme.

[0687] In some embodiments, a modified (e.g., BBB receptor-binding) Fc polypeptide present in an anti-Tau antibody of the invention comprises at least one, two, or three substitutions; and in some embodiments, at least four, five, six, seven, eight, or nine substitutions at amino acid positions 384, 386, 387, 388, 389, 390, 413, 416, and 421, according to the EU numbering scheme.

### FcRn Binding Sites

[0688] In certain aspects, modified (e.g., BBB receptor-binding) Fc polypeptides, or Fc polypeptides present in an anti-Tau antibody of the invention that do not specifically bind to a BBB receptor, can also comprise an FcRn binding site. In some embodiments, the FcRn binding site is within the Fc polypeptide or a fragment thereof.

[0689] In some embodiments, the FcRn binding site comprises a native FcRn binding site. In some embodiments, the FcRn binding site does not comprise amino acid changes relative to the amino acid sequence of a native FcRn binding site. In some embodiments, the native FcRn binding site is an IgG binding site, e.g., a human IgG binding site. In some embodiments, the FcRn binding site comprises a modification that alters FcRn binding.

[0690] In some embodiments, an FcRn binding site has one or more amino acid residues that are mutated, e.g., substituted, wherein the mutation(s) increase serum half-life or do not substantially reduce serum half-life (i.e., reduce serum half-life by no more than 25% compared to a counterpart modified Fc polypeptide having the wild-type residues at the mutated positions when assayed under the same conditions). In some embodiments, an FcRn binding site has one or more amino acid residues that are substituted at positions 251-256, 428, and 433-436, according to the EU numbering scheme.

[0691] In some embodiments, one or more residues at or near an FcRn binding site are mutated, relative to a native human IgG sequence, to extend serum half-life of the modified polypeptide. In some embodiments, a mutation, e.g., a substitution, is introduced at one or more of positions 244-257, 279-284, 307-317, 383-390, and 428-435, according to the EU numbering scheme. In some embodiments, one or more mutations are introduced at positions 251, 252, 254, 255, 256, 307, 308, 309, 311, 312, 314, 385, 386, 387, 389, 428, 433, 434, or 436, according to the EU numbering scheme. In some embodiments, mutations are introduced into one, two, or three of positions 252, 254, and 256. In some embodiments, the mutations are M252Y, S254T, and T256E. In some embodiments, a modified Fc polypeptide further comprises the mutations M252Y, S254T, and T256E. In some embodiments, the mutations are M428L and/or N434S. In some embodiments, a modified Fc polypeptide further comprises the mutation N434S with or without M428L. In some embodiments, a modified Fc polypeptide comprises a mutation at one, two, or all three of positions T307, E380, and N434, according to the EU numbering scheme. In some embodiments, the mutations are T307Q and N434A. In some embodiments, a modified Fc polypeptide comprises mutations T307A, E380A, and N434A. In some embodiments, a modified Fc polypeptide comprises mutations at positions T250 and M428, according to the EU numbering scheme. In some embodiments, the modified Fc polypeptide comprises mutations T250Q and/or M428L. In some embodiments, a modified Fc polypeptide comprises mutations at positions M428 and N434, according to the EU numbering scheme. In some embodiments, the modified Fc polypeptide comprises mutations M428L and N434S. In some embodiments, the modified Fc polypeptide comprises an N434S or N434A mutation.

### V. Transferrin Receptor-Binding Fc Polypeptides

[0692] This section describes generation of modified Fc polypeptides in accordance with the invention that bind to transferrin receptor (TfR) and are capable of being transported across the blood-brain barrier (BBB).

### TfR-Binding Fc Polypeptides Comprising Mutations in the CH3 Domain

[0693] In some embodiments, a modified Fc polypeptide that specifically binds to TfR comprises substitutions in a CH3 domain. In some embodiments, a modified Fc polypeptide comprises a human Ig CH3 domain, such as an IgG CH3 domain, that is modified for TfR-binding activity. The CH3 domain can be of any IgG subtype, i.e., from IgG1, IgG2, IgG3, or IgG4. In the context of IgG antibodies, a CH3 domain refers to the segment of amino acids from about position 341 to about position 447 as numbered according to the EU numbering scheme.

[0694] In some embodiments, a modified Fc polypeptide that specifically binds to TfR binds to the apical domain of TfR and may bind to TfR without blocking or otherwise inhibiting binding of transferrin to TfR. In some embodiments, binding of transferrin to TfR is not substantially inhibited. In some embodiments, binding of transferrin to TfR is inhibited by less than about 50% (e.g., less than about 45%, 40%, 35%, 30%, 25%, 20%, 15%, 10%, or 5%). In some embodiments, binding of transferrin to TfR is inhibited by less than about 20% (e.g., less than about 19%, 18%, 17%, 16%, 15%, 14%, 13%, 12%, 11%, 10%, 9%, 8%, 7%, 6%, 5%, 4%, 3%, 2%, or 1%).

[0695] In some embodiments, a modified Fc polypeptide that specifically binds to TfR comprises at least two, three, four, five, six, seven, eight, or nine substitutions at positions 384, 386, 387, 388, 389, 390, 413, 416, and 421, according to the EU numbering scheme. Illustrative substitutions that may be introduced at these positions are shown in Tables 13 and 14. In some embodiments, the amino acid at position 388 and/or 421 is an aromatic amino acid, e.g., Trp, Phe, or Tyr. In some embodiments, the amino acid at position 388 is Trp. In some embodiments, the aromatic amino acid at position 421 is Trp or Phe.

[0696] In some embodiments, at least one position as follows is substituted: Leu, Tyr, Met, or Val at position 384; Leu, Thr, His, or Pro at position 386; Val, Pro, or an acidic amino acid at position 387; an aromatic amino acid, e.g., Trp at position 388; Val, Ser, or Ala at position 389; an acidic amino acid, Ala, Ser, Leu, Thr, or Pro at position 413; Thr or an acidic amino acid at position 416; or Trp, Tyr, His, or Phe at position 421. In some embodiments, the modified Fc polypeptide may comprise a conservative substitution, e.g., an amino acid in the same charge grouping, hydrophobicity grouping, side chain ring structure grouping (e.g., aromatic amino acids), or size grouping, and/or polar or non-polar grouping, of a specified amino acid at one or more of the positions in the set. Thus, for example, Ile may be present at position 384, 386, and/or position 413. In some embodiments, the acidic amino acid at position one, two, or each of positions 387, 413, and 416 is Glu. In other embodiments, the acidic amino acid at one, two or each of positions 387, 413, and 416 is Asp. In some embodiments, two, three, four, five, six, seven, or all eight of positions 384, 386, 387, 388, 389, 413, 416, and 421 have an amino acid substitution as specified in this paragraph.

[0697] In some embodiments, an Fc polypeptide that is modified as described in the preceding two paragraphs comprises a native Asn at position 390. In some embodiments, the modified Fc polypeptide comprises Gly, His, Gln, Leu, Lys, Val, Phe, Ser, Ala, or Asp at position 390. In some embodiments, the modified Fc polypeptide further comprises one, two, three, or four substitutions at positions comprising 380, 391, 392, and 415, according to the EU numbering scheme. In some embodiments, Trp, Tyr, Leu, or Gln may be present at position 380. In some embodiments, Ser, Thr, Gln, or Phe may be present at position 391. In some embodiments, Gln, Phe, or His may be present at position 392. In some embodiments, Glu may be present at position 415.

[0698] In certain embodiments, the modified Fc polypeptide comprises two, three, four, five, six, seven, eight, nine, ten, or eleven positions selected from the following: Trp, Leu, or Glu at position 380; Tyr or Phe at position 384; Thr at position 386; Glu at position 387; Trp at position 388; Ser, Ala, Val, or Asn at position 389; Ser or Asn at position 390; Thr or Ser at position 413; Glu or Ser at position 415; Glu at position 416; and/or Phe at position 421. In some embodiments, the modified Fc polypeptide comprises all eleven positions as follows: Trp, Leu, or Glu at position 380; Tyr or Phe at position 384; Thr at position 386; Glu at position 387; Trp at position 388; Ser, Ala, Val, or Asn at position 389; Ser or Asn at position 390; Thr or Ser at position 413; Glu or Ser at position 415; Glu at position 416; and/or Phe at position 421.

[0699] In certain embodiments, the modified Fc polypeptide comprises Leu or Met at position 384; Leu, His, or Pro at position 386; Val at position 387; Trp at position 388; Val or Ala at position 389; Pro at position 413; Thr at position 416; and/or Trp at position 421. In some embodiments, the modified Fc polypeptide further comprises Ser, Thr, Gln, or Phe at position 391. In some embodiments, the modified Fc polypeptide further comprises Trp, Tyr, Leu, or Gln at position 380 and/or Gln, Phe, or His at position 392. In some embodiments, Trp is present at position 380 and/or Gln is present at position 392. In some embodiments, the modified Fc polypeptide does not have a Trp at position 380.

[0700] In other embodiments, the modified Fc polypeptide comprises Tyr at position 384; Thr at position 386; Glu or Val and position 387; Trp at position 388; Ser at position 389; Ser or Thr at position 413; Glu at position 416; and/or Phe at position 421. In some embodiments, the modified Fc polypeptide comprises a native Asn at position 390. In certain embodiments, the modified Fc polypeptide further comprises Trp, Tyr, Leu, or Gln at position 380; and/or Glu at position 415. In some embodiments, the modified Fc polypeptide further comprises Trp at position 380 and/or Glu at position 415.

[0701] In additional embodiments, the modified Fc polypeptide further comprises one, two, or three substitutions at positions comprising 414, 424, and 426, according to the EU numbering scheme. In some embodiments, position 414 is Lys, Arg, Gly, or Pro; position 424 is Ser, Thr, Glu, or Lys; and/or position 426 is Ser, Trp, or Gly.

[0702] In some embodiments, the modified Fc polypeptide comprises one or more of the following substitutions: Trp at position 380; Thr at position 386; Trp at position 388; Val at position 389; Thr or Ser at position 413; Glu at position 415; and/or Phe at position 421, according to the EU numbering scheme.

[0703] In some embodiments, the modified Fc polypeptide has at least 70% identity, at least 75% identity, at least 80% identity, at least 85% identity, at least 90% identity, or at least 95% identity to amino acids 111-217 of any one of SEQ ID NOS: 184-278 (e.g., SEQ ID NOS:214-218, 238, 240-270, and 469-475). In some embodiments, the modified Fc polypeptide has at least 70% identity, at least 75% identity, at least 80% identity, at least 85% identity, at least 90% identity, or at least 95% identity to any one of SEQ ID NOS:184-278 (e.g., SEQ ID NOS:214-218, 238, 240-270, and 469-475). In some embodiments, the modified Fc polypeptide comprises the amino acids at EU index positions 384-390 and/or 413-421 of any one of SEQ ID NOS:184-278 (e.g., SEQ ID NOS:214-218, 238, 240-270, and 469-475). In some embodiments, the modified Fc polypeptide comprises the amino acids at EU index positions 380-390 and/or 413-421 of any one of SEQ ID NOS:184-278 (e.g., SEQ ID NOS:214-218, 238, 240-270, and 469-475). In some embodiments, the modified Fc polypeptide comprises the amino acids at EU index positions 380-392 and/or 413-426 of any one of SEQ ID NOS:184-278 (e.g., SEQ ID NOS:214-218, 238, 240-270, and 469-475).

[0704] In some embodiments, the modified Fc polypeptide has at least 75% identity, at least 80% identity, at least 85% identity, at least 90% identity, or at least 95% identity to any one of SEQ ID NOS:184-278 (e.g., SEQ ID NOS:214-218, 238, 240-270, and 469-475), and further comprises at at least five, six, seven, eight, nine, ten, eleven, twelve, thirteen, fourteen, fifteen, or sixteen of the positions, numbered according to the EU index, as follows: Trp, Tyr, Leu, Gln, or Glu at position 380; Leu, Tyr, Met, or Val at position 384; Leu, Thr, His, or Pro at position 386; Val, Pro, or an acidic amino acid at position 387; an aromatic amino acid, e.g., Trp, at position 388; Val, Ser, or Ala at position 389; Ser or Asn at position 390; Ser, Thr, Gln, or Phe at position 391; Gin, Phe, or His at position 392; an acidic amino acid, Ala, Ser, Leu, Thr, or Pro at position 413; Lys, Arg, Gly or Pro at position 414; Glu or Ser at position 415; Thr or an acidic amino acid at position 416; Trp, Tyr, His or Phe at position 421; Ser, Thr, Glu or Lys at position 424; and Ser, Trp, or Gly at position 426.

[0705] In some embodiments, the modified Fc polypeptide comprises the amino acid sequence of any one of SEQ ID NOS:214-218, 238, 240-270, and 469-475. In other embodiments, the modified Fc polypeptide comprises the amino acid sequence of any one of SEQ ID NOS:214-218, 238, 240-270, and 469-475, but in which one, two, or three amino acids are substituted.

[0706] In some embodiments, the modified Fc polypeptide comprises additional mutations such as the mutations described in Section VI below, including, but not limited to, a knob mutation (e.g., T366W as numbered with reference to EU numbering), hole mutations (e.g., T366S, L368A, and Y407V as numbered with reference to EU numbering), mutations that modulate effector function (e.g., L234A, L235A, and/or P329G (e.g., L234A and L235A) as numbered with reference to EU numbering), and/or mutations that increase serum stability (e.g., (i) M252Y, S254T, and T256E as numbered with reference to EU numbering, or (ii) N434S with or without M428L as numbered with reference to EU numbering). By way of illustration, SEQ ID NOS:271-278, 342-413, and 476-585 provide non-limiting examples of modified Fc polypeptides with mutations in the CH3 domain (e.g., CH3C.35.20.1, CH3C.35.23.2, CH3C.35.23.3, CH3C.35.23.4, CH3C.35.21.17.2, CH3C.35.23, CH3C.35.21, CH3C.35.20.1.1, CH3C.23.2.1, and CH3C.35.23.1.1) comprising one or more of these additional mutations.

[0707] In some embodiments, the modified Fc polypeptide comprises a knob mutation (e.g., T366W as numbered with reference to EU numbering) and has at least 85% identity, at least 90% identity, or at least 95% identity to the sequence of any one of SEQ ID NOS:271, 342, 354, 366, 378, 390, 402, 480, 492, and 504. In some embodiments, the modified Fc polypeptide comprises the sequence of any one of SEQ ID NOS:271, 342, 354, 366, 378, 390, 402, 480, 492, and 504.

[0708] In some embodiments, the modified Fc polypeptide comprises a knob mutation (e.g., T366W as numbered with reference to EU numbering) and mutations that modulate effector function (e.g., L234A, L235A, and/or P329G (e.g., L234A and L235A) as numbered with reference to EU numbering), and has at least 85% identity, at least 90% identity, or at least 95% identity to the sequence of any one of SEQ ID NOS:272, 343, 344, 355, 356, 367, 368, 379, 380, 391, 392, 403, 404, 476, 481, 482, 493, 494, 505, and 506. In some embodiments, the modified Fc polypeptide comprises the sequence of any one of SEQ ID NOS:272, 343, 344, 355, 356, 367, 368, 379, 380, 391, 392, 403, 404, 476, 481, 482, 493, 494, 505, and 506.

[0709] In some embodiments, the modified Fc polypeptide comprises a knob mutation (e.g., T366W as numbered with reference to EU numbering) and mutations that increase serum stability (e.g., M252Y, S254T, and T256E as numbered with reference to EU numbering), and has at least 85% identity, at least 90% identity, or at least 95% identity to the sequence of any one of SEQ ID NOS:273, 345, 357, 369, 381, 393, 405, 483, 495, and 507. In some embodiments, the modified Fc polypeptide comprises the sequence of any one of SEQ ID NOS:273, 345, 357, 369, 381, 393, 405, 483, 495, and 507.

[0710] In some embodiments, the modified Fc polypeptide comprises a knob mutation (e.g., T366W as numbered with reference to EU numbering) and mutations that increase serum stability (e.g., N434S with or without M428L as numbered with reference to EU numbering), and has at least 85% identity, at least 90% identity, or at least 95% identity to the sequence of any one of SEQ ID NOS:517, 524, 531, 538, 545, 552, 559, 566, 573, and 580. In some embodiments, the modified Fc polypeptide comprises the sequence of any one of SEQ ID NOS:517, 524, 531, 538, 545, 552, 559, 566, 573, and 580.

[0711] In some embodiments, the modified Fc polypeptide comprises a knob mutation (e.g., T366W as numbered with reference to EU numbering), mutations that modulate effector function (e.g., L234A, L235A, and/or P329G (e.g., L234A and L235A) as numbered with reference to EU numbering), and mutations that increase serum stability (e.g., M252Y, S254T, and T256E as numbered with reference to EU numbering), and has at least 85% identity, at least 90% identity, or at least 95% identity to the sequence of any one of SEQ ID NOS:274, 346, 347, 358, 359, 370, 371, 382, 383, 394, 395, 406, and 407, 477, 484, 485, 496, 497, 508, and 509. In some embodiments, the modified Fc polypeptide comprises the sequence of any one of SEQ ID NOS:274, 346, 347, 358, 359, 370, 371, 382, 383, 394, 395, 406, and 407, 477, 484, 485, 496, 497, 508, and 509.

[0712] In some embodiments, the modified Fc polypeptide comprises a knob mutation (e.g., T366W as numbered with reference to EU numbering), mutations that modulate effector function (e.g., L234A, L235A, and/or P329G (e.g., L234A and L235A) as numbered with reference to EU numbering), and mutations that increase serum stability (e.g., N434S with or without M428L as numbered with reference to EU numbering), and has at least 85% identity, at least 90% identity, or at least 95% identity to the sequence of any one of SEQ ID NOS:518, 519, 525, 526, 532, 533, 539, 540, 546, 547, 553, 554, 560, 561, 567, 568, 574, 575, 581, and 582. In some embodiments, the modified Fc polypeptide comprises the sequence of any one of SEQ ID NOS:518, 519, 525, 526, 532, 533, 539, 540, 546, 547, 553, 554, 560, 561, 567, 568, 574, 575, 581, and 582.

[0713] In some embodiments, the modified Fc polypeptide comprises hole mutations (e.g., T366S, L368A, and Y407V as numbered with reference to EU numbering) and has at least 85% identity, at least 90% identity, or at least 95% identity to the sequence of any one of SEQ ID NOS:275, 348, 360, 372, 384, 396, 408, 486, 498, and 510. In some embodiments, the modified Fc polypeptide comprises the sequence of any one of SEQ ID NOS:275, 348, 360, 372, 384, 396, 408, 486, 498, and 510.

[0714] In some embodiments, the modified Fc polypeptide comprises hole mutations (e.g., T366S, L368A, and Y407V as numbered with reference to EU numbering) and mutations that modulate effector function (e.g., L234A, L235A, and/or P329G (e.g., L234A and L235A) as numbered with reference to EU numbering), and has at least 85% identity, at least 90% identity, or at least 95% identity to the sequence of any one of SEQ ID NOS:276, 349, 350, 361, 362, 373, 374, 385, 386, 397, 398, 409, 410, 478, 487, 488, 499, 500, 511, and 512. In some embodiments, the modified Fc polypeptide comprises the sequence of any one of SEQ ID NOS:276, 349, 350, 361, 362, 373, 374, 385, 386, 397, 398, 409, 410, 478, 487, 488, 499, 500, 511, and 512.

[0715] In some embodiments, the modified Fc polypeptide comprises hole mutations (e.g., T366S, L368A, and Y407V as numbered with reference to EU numbering) and mutations that increase serum stability (e.g., M252Y, S254T, and T256E as numbered with reference to EU numbering), and has at least 85% identity, at least 90% identity, or at least 95% identity to the sequence of any one of SEQ ID NOS:277, 351, 363, 375, 387, 399, 411, 489, 501, and 513. In some embodiments, the modified Fc polypeptide comprises the sequence of any one of SEQ ID NOS:277, 351, 363, 375, 387, 399, 411, 489, 501, and 513.

[0716] In some embodiments, the modified Fc polypeptide comprises hole mutations (e.g., T366S, L368A, and Y407V as numbered with reference to EU numbering) and mutations that increase serum stability (e.g., N434S with or without M428L as numbered with reference to EU numbering), and has at least 85% identity, at least 90% identity, or at least 95% identity to the sequence of any one of SEQ ID NOS:520, 527, 534, 541, 548, 555, 562, 569, 576, and 583. In some embodiments, the modified Fc polypeptide comprises the sequence of any one of SEQ ID NOS:520, 527, 534, 541, 548, 555, 562, 569, 576, and 583.

[0717] In some embodiments, the modified Fc polypeptide comprises hole mutations (e.g., T366S, L368A, and Y407V as numbered with reference to EU numbering), mutations that modulate effector function (e.g., L234A, L235A, and/or P329G (e.g., L234A and L235A) as numbered with reference to EU numbering), and mutations that increase serum stability (e.g., M252Y, S254T, and T256E as numbered with reference to EU numbering), and has at least 85% identity, at least 90% identity, or at least 95% identity to the sequence of any one of SEQ ID NOS:278, 352, 353, 364, 365, 376, 377, 388, 389, 400, 401, 412, 413, 479, 490, 491, 502, 503, 514, and 515. In some embodiments, the modified Fc polypeptide comprises the sequence of any one of SEQ ID NOS:278, 352, 353, 364, 365, 376, 377, 388, 389, 400, 401, 412, 413, 479, 490, 491, 502, 503, 514, and 515.

[0718] In some embodiments, the modified Fc polypeptide comprises hole mutations (e.g., T366S, L368A, and Y407V as numbered with reference to EU numbering), mutations that modulate effector function (e.g., L234A, L235A, and/or P329G (e.g., L234A and L235A) as numbered with reference to EU numbering), and mutations that increase serum stability (e.g., N434S with or without M428L as numbered with reference to EU numbering), and has at least 85% identity, at least 90% identity, or at least 95% identity to the sequence of any one of SEQ ID NOS:521, 522, 528, 529, 535, 536, 542, 543, 549, 550, 556, 557, 563, 564, 570, 571, 577, 578, 584, and 585. In some embodiments, the modified Fc polypeptide comprises the sequence of any one of SEQ ID NOS:521, 522, 528, 529, 535, 536, 542, 543, 549, 550, 556, 557, 563, 564, 570, 571, 577, 578, 584, and 585.

[0719] In some embodiments, a modified Fc polypeptide that specifically binds to TfR comprises at least two, three, four, five, six, seven, or eight substitutions at positions 345, 346, 347, 349, 437, 438, 439, and 440, according to the EU numbering scheme. Illustrative modified Fc polypeptides are provided in SEQ ID NOS:289-293. In some embodiments, the modified Fc polypeptide comprises Gly at position 437; Phe at position 438; and/or Asp at position 440. In some embodiments, Glu is present at position 440. In certain embodiments, the modified Fc polypeptide comprises at least one substitution at a position as follows: Phe or Ile at position 345; Asp, Glu, Gly, Ala, or Lys at position 346; Tyr, Met, Leu, Ile, or Asp at position 347; Thr or Ala at position 349; Gly at position 437; Phe at position 438; His Tyr, Ser, or Phe at position 439; or Asp at position 440. In some embodiments, two, three, four, five, six, seven, or all eight of positions 345, 346, 347, 349, 437, 438, 439, and 440 and have a substitution as specified in this paragraph. In some embodiments, the modified Fc polypeptide may comprise a conservative substitution, e.g., an amino acid in the same charge grouping, hydrophobicity grouping, side chain ring structure grouping (e.g., aromatic amino acids), or size grouping, and/or polar or non-polar grouping, of a specified amino acid at one or more of the positions in the set.

[0720] In some embodiments, the modified Fc polypeptide has at least 70% identity, at least 75% identity, at least 80% identity, at least 85% identity, at least 90% identity, or at least 95% identity to amino acids 111-217 of any one of SEQ ID NOS:289-293. In some embodiments, the modified Fc polypeptide has at least 70% identity, at least 75% identity, at least 80% identity, at least 85% identity, at least 90% identity, or at least 95% identity to SEQ ID NOS:289-293. In some embodiments, the modified Fc polypeptide comprises the amino acid sequence of any one of SEQ ID NOS:289-293. In other embodiments, the modified Fc polypeptide comprises the amino acid sequence of any one of SEQ ID NOS:289-293, but in which one, two, or three amino acids are substituted.

### TfR-Binding Fc Polypeptides Comprising Mutations in the CH2 Domain

[0721] In some embodiments, a modified Fc polypeptide that specifically binds to TfR comprises substitutions in a CH2 domain. In some embodiments, a modified Fc polypeptide comprises a human Ig CH2 domain, such as an IgG CH2 domain, that is modified for TfR-binding activity. The CH2 domain can be of any IgG subtype, i.e., from IgG1, IgG2, IgG3, or IgG4. In the context of IgG antibodies, a CH2 domain refers to the segment of amino acids from about position 231 to about position 340 as numbered according to the EU numbering scheme.

[0722] In some embodiments, a modified Fc polypeptide that specifically binds to TfR comprises at least two, three, four, five, six, seven, eight, or nine substitutions at positions 274, 276, 283, 285, 286, 287, 288, and 290, according to the EU numbering scheme. Illustrative modified Fc polypeptides are provided in SEQ ID NOS:294-298. In some embodiments, the modified Fc polypeptide comprises Glu at position 287 and/or Trp at position 288. In some embodiments, the modified Fc polypeptide comprises at least one substitution at a position as follows: Glu, Gly, Gln, Ser, Ala, Asn, Tyr, or Trp at position 274; Ile, Val, Asp, Glu, Thr, Ala, or Tyr at position 276; Asp, Pro, Met, Leu, Ala, Asn, or Phe at position 283; Arg, Ser, Ala, or Gly at position 285; Tyr, Trp, Arg, or Val at position 286; Glu at position 287; Trp or Tyr at position 288; Gln, Tyr, His, Ile, Phe, Val, or Asp at position 289; or Leu, Trp, Arg, Asn, Tyr, or Val at position 290. In some embodiments, two, three, four, five, six, seven, eight, or all nine of positions 274, 276, 283, 285, 286, 287, 288, and 290 have a substitution as specified in this paragraph. In some embodiments, the modified Fc polypeptide may comprise a conservative substitution, e.g., an amino acid in the same charge grouping, hydrophobicity grouping, side chain ring structure grouping (e.g., aromatic amino acids), or size grouping, and/or polar or non-polar grouping, of a specified amino acid at one or more of the positions in the set.

[0723] In some embodiments, the modified Fc polypeptide comprises Glu, Gly, Gln, Ser, Ala, Asn, or Tyr at position 274; Ile, Val, Asp, Glu, Thr, Ala, or Tyr at position 276 Asp, Pro, Met, Leu, Ala, or Asn at position 283; Arg, Ser, or Ala at position 285; Tyr, Trp, Arg, or Val at position 286; Glu at position 287; Trp at position 288; Gln, Tyr, His, Ile, Phe, or Val at position 289; and/or Leu, Trp, Arg, Asn, or Tyr at position 290. In some embodiments, the modified Fc polypeptide comprises Arg at position 285; Tyr or Trp at position 286; Glu at position 287; Trp at position 288; and/or Arg or Trp at position 290.

[0724] In some embodiments, the modified Fc polypeptide has at least 70% identity, at least 75% identity, at least 80% identity, at least 85% identity, at least 90% identity, or at least 95% identity to amino acids 1-110 of any one of SEQ ID NOS:294-298. In some embodiments, the modified Fc polypeptide has at least 70% identity, at least 75% identity, at least 80% identity, at least 85% identity, at least 90% identity, or at least 95% identity to SEQ ID NOS:294-298. In some embodiments, the modified Fc polypeptide comprises the amino acid sequence of any one of SEQ ID NOS:294-298. In other embodiments, the modified Fc polypeptide comprises the amino acid sequence of any one of SEQ ID NOS:294-298, but in which one, two, or three amino acids are substituted.

[0725] In some embodiments, a modified Fc polypeptide that specifically binds to TfR comprises at least two, three, four, five, six, seven, eight, nine, or ten substitutions at positions 266, 267, 268, 269, 270, 271, 295, 297, 298, and 299, according to the EU numbering scheme. Illustrative modified Fc polypeptides are provided in SEQ ID NOS:299-303. In some embodiments, the modified Fc polypeptide comprises Pro at position 270, Glu at position 295, and/or Tyr at position 297. In some embodiments, the modified Fc polypeptide comprises at least one substitution at a position as follows: Pro, Phe, Ala, Met, or Asp at position 266; Gln, Pro, Arg, Lys, Ala, Ile, Leu, Glu, Asp, or Tyr at position 267; Thr, Ser, Gly, Met, Val, Phe, Trp, or Leu at position 268; Pro, Val, Ala, Thr, or Asp at position 269; Pro, Val, or Phe at position 270; Trp, Gln, Thr, or Glu at position 271; Glu, Val, Thr, Leu, or Trp at position 295; Tyr, His, Val, or Asp at position 297; Thr, His, Gln, Arg, Asn, or Val at position 298; or Tyr, Asn, Asp, Ser, or Pro at position 299. In some embodiments, two, three, four, five, six, seven, eight, nine, or all ten of positions 266, 267, 268, 269, 270, 271, 295, 297, 298, and 299 have a substitution as specified in this paragraph. In some embodiments, a modified Fc polypeptide may comprise a conservative substitution, e.g., an amino acid in the same charge grouping, hydrophobicity grouping, side chain ring structure grouping (e.g., aromatic amino acids), or size grouping, and/or polar or non-polar grouping, of a specified amino acid at one or more of the positions in the set.

[0726] In some embodiments, the modified Fc polypeptide comprises Pro, Phe, or Ala at position 266; Gln, Pro, Arg, Lys, Ala, or Ile at position 267; Thr, Ser, Gly, Met, Val, Phe, or Trp at position 268; Pro, Val, or Ala at position 269; Pro at position 270; Trp or Gln at position 271; Glu at position 295; Tyr at position 297; Thr, His, or Gln at position 298; and/or Tyr, Asn, Asp, or Ser at position 299.

[0727] In some embodiments, the modified Fc polypeptide comprises Met at position 266; Leu or Glu at position 267; Trp at position 268; Pro at position 269; Val at position 270; Thr at position 271; Val or Thr at position 295; His at position 197; His, Arg, or Asn at position 198; and/or Pro at position 299.

[0728] In some embodiments, the modified Fc polypeptide comprises Asp at position 266; Asp at position 267; Leu at position 268; Thr at position 269; Phe at position 270; Gln at position 271; Val or Leu at position 295; Val at position 297; Thr at position 298; and/or Pro at position 299.

[0729] In some embodiments, the modified Fc polypeptide has at least 70% identity, at least 75% identity, at least 80% identity, at least 85% identity, at least 90% identity, or at least 95% identity to amino acids 1-110 of any one of SEQ ID NOS:299-303. In some embodiments, the modified Fc polypeptide has at least 70% identity, at least 75% identity, at least 80% identity, at least 85% identity, at least 90% identity, or at least 95% identity to SEQ ID NOS:299-303. In some embodiments, the modified Fc polypeptide comprises the amino acid sequence of any one of SEQ ID NOS:299-303. In other embodiments, the modified Fc polypeptide comprises the amino acid sequence of any one of SEQ ID NOS:299-303, but in which one, two, or three amino acids are substituted.

[0730] In some embodiments, a modified Fc polypeptide that specifically binds to TfR comprises at least two, three, four, five, six, seven, eight, nine, or ten substitutions at positions 268, 269, 270, 271, 272, 292, 293, 294, and 300, according to the EU numbering scheme. Illustrative modified Fc polypeptides are provided in SEQ ID NOS:304-308. In some embodiments, the modified Fc polypeptide comprises at least one substitution at a position as follows: Val or Asp at position 268; Pro, Met, or Asp at position 269; Pro or Trp at position 270; Arg, Trp, Glu, or Thr at position 271; Met, Tyr, or Trp at position 272; Leu or Trp at position 292; Thr, Val, Ile, or Lys at position 293; Ser, Lys, Ala, or Leu at position 294; His, Leu, or Pro at position 296; or Val or Trp at position 300. In some embodiments, two, three, four, five, six, seven, eight, nine, or all ten of positions 268, 269, 270, 271, 272, 292, 293, 294, and 300 have a substitution as specified in this paragraph. In some embodiments, the modified Fc polypeptide may comprise a conservative substitution, e.g., an amino acid in the same charge grouping, hydrophobicity grouping, side chain ring structure grouping (e.g., aromatic amino acids), or size grouping, and/or polar or non-polar grouping, of a specified amino acid at one or more of the positions in the set.

[0731] In some embodiments, the modified Fc polypeptide comprises Val at position 268; Pro at position 269; Pro at position 270; Arg or Trp at position 271; Met at position 272; Leu at position 292; Thr at position 293; Ser at position 294; His at position 296; and/or Val at position 300.

[0732] In some embodiments, the modified Fc polypeptide comprises Asp at position 268; Met or Asp at position 269; Trp at position 270; Glu or Thr at position 271; Tyr or Trp at position 272; Trp at position 292; Val, Ile, or Lys at position 293; Lys, Ala, or Leu at position 294; Leu or Pro at position 296; and/or Trp at position 300.

[0733] In some embodiments, the modified Fc polypeptide has at least 70% identity, at least 75% identity, at least 80% identity, at least 85% identity, at least 90% identity, or at least 95% identity to amino acids 1-110 of any one of SEQ ID NOS:304-308. In some embodiments, the modified Fc polypeptide has at least 70% identity, at least 75% identity, at least 80% identity, at least 85% identity, at least 90% identity, or at least 95% identity to SEQ ID NOS:304-308. In some embodiments, the modified Fc polypeptide comprises the amino acid sequence of any one of SEQ ID NOS:304-308. In other embodiments, the modified Fc polypeptide comprises the amino acid sequence of any one of SEQ ID NOS:304-308, but in which one, two, or three amino acids are substituted.

[0734] In some embodiments, a modified Fc polypeptide that specifically binds to TfR has at least two, three, four, five, six, seven, eight, nine, or ten substitutions at positions 272, 274, 276, 322, 324, 326, 329, 330, and 331, according to the EU numbering scheme. Illustrative modified Fc polypeptides are provided in SEQ ID NOS:309-313. In some embodiments, the modified Fc polypeptide comprises Trp at position 330. In some embodiments, the modified Fc polypeptide comprises at least one substitution at a position as follows: Trp, Val, Ile, or Ala at position 272; Trp or Gly at position 274; Tyr, Arg, or Glu at position 276; Ser, Arg, or Gln at position 322; Val, Ser, or Phe at position 324; Ile, Ser, or Trp at position 326; Trp, Thr, Ser, Arg, or Asp at position 329; Trp at position 330; or Ser, Lys, Arg, or Val at position 331. In some embodiments, two, three, four, five, six, seven, eight, or all nine of positions 272, 274, 276, 322, 324, 326, 329, 330, and 331 have a substitution as specified in this paragraph. In some embodiments, the modified Fc polypeptide may comprise a conservative substitution, e.g., an amino acid in the same charge grouping, hydrophobicity grouping, side chain ring structure grouping (e.g., aromatic amino acids), or size grouping, and/or polar or non-polar grouping, of a specified amino acid at one or more of the positions in the set.

[0735] In some embodiments, the modified Fc polypeptide comprises two, three, four, five, six, seven, eight, or nine positions selected from the following: position 272 is Trp, Val, Ile, or Ala; position 274 is Trp or Gly; position 276 is Tyr, Arg, or Glu; position 322 is Ser, Arg, or Gln; position 324 is Val, Ser, or Phe; position 326 is Ile, Ser, or Trp; position 329 is Trp, Thr, Ser, Arg, or Asp; position 330 is Trp; and position 331 is Ser, Lys, Arg, or Val. In some embodiments, the modified Fc polypeptide comprises Val or Ile at position 272; Gly at position 274; Arg at position 276; Arg at position 322; Ser at position 324; Ser at position 326; Thr, Ser, or Arg at position 329; Trp at position 330; and/or Lys or Arg at position 331.

[0736] In some embodiments, the modified Fc polypeptide has at least 70% identity, at least 75% identity, at least 80% identity, at least 85% identity, at least 90% identity, or at least 95% identity to amino acids 1-110 of any one of SEQ ID NOS:309-313. In some embodiments, the modified Fc polypeptide has at least 70% identity, at least 75% identity, at least 80% identity, at least 85% identity, at least 90% identity, or at least 95% identity to SEQ ID NOS:309-313. In some embodiments, the modified Fc polypeptide comprises the amino acid sequence of any one of SEQ ID NOS:309-313. In other embodiments, the modified Fc polypeptide comprises the amino acid sequence of any one of SEQ ID NOS:309-313, but in which one, two, or three amino acids are substituted.

### VI. Additional Fc Polypeptide Mutations

[0737] In some aspects, an anti-Tau antibody of the invention comprises two Fc polypeptides that may each comprise independently selected modifications or may be a wild-type Fc polypeptide, e.g., a human IgG1 Fc polypeptide. In some embodiments, one or both Fc polypeptides contains one or more modifications that confer binding to a blood-brain barrier (BBB) receptor, e.g., transferrin receptor (TfR). Non-limiting examples of other mutations that can be introduced into one or both Fc polypeptides include, e.g., mutations to increase serum stability, to modulate effector function, to influence glycosylation, to reduce immunogenicity in humans, and/or to provide for knob and hole heterodimerization of the Fc polypeptides.

[0738] In some embodiments, one or more Fc polypeptides (e.g., a first and optionally a second Fc polypeptide) has an amino acid sequence identity of at least about 75%, 76%, 77%, 78%, 79%, 80%, 81%, 82%, 83%, 84%, 85%, 86%, 87%, 88%, 89%, 90%, 91%, 92%, 93%, 94%, 95%, 96%, 97%, 98%, or 99% to a corresponding wild-type Fc polypeptide (e.g., a human IgG1, IgG2, IgG3, or IgG4 Fc polypeptide).

[0739] In some embodiments, the Fc polypeptides present in the anti-Tau antibody include knob and hole mutations to promote heterodimer formation and hinder homodimer formation. Generally, the modifications introduce a protuberance (“knob”) at the interface of a first polypeptide and a corresponding cavity (“hole”) in the interface of a second polypeptide, such that the protuberance can be positioned in the cavity so as to promote heterodimer formation and thus hinder homodimer formation. Protuberances are constructed by replacing small amino acid side chains from the interface of the first polypeptide with larger side chains (e.g., tyrosine or tryptophan). Compensatory cavities of identical or similar size to the protuberances are created in the interface of the second polypeptide by replacing large amino acid side chains with smaller ones (e.g., alanine or threonine). In some embodiments, such additional mutations are at a position in the Fc polypeptide that does not have a negative effect on binding of the polypeptide to a BBB receptor, e.g., TfR.

[0740] In one illustrative embodiment of a knob and hole approach for dimerization, position 366 (numbered according to the EU numbering scheme) of one of the Fc polypeptides present in the anti-Tau antibody comprises a tryptophan in place of a native threonine. The other Fc polypeptide in the dimer has a valine at position 407 (numbered according to the EU numbering scheme) in place of the native tyrosine. The other Fc polypeptide may further comprise a substitution in which the native threonine at position 366 (numbered according to the EU numbering scheme) is substituted with a serine and a native leucine at position 368 (numbered according to the EU numbering scheme) is substituted with an alanine. Thus, one of the Fc polypeptides of an anti-Tau antibody of the invention has the T366W knob mutation and the other Fc polypeptide has the Y407V mutation, which is typically accompanied by the T366S and L368A hole mutations.

[0741] In some embodiments, modifications to enhance serum half-life may be introduced. For example, in some embodiments, one or both Fc polypeptides present in an anti-Tau antibody of the invention may comprise a tyrosine at position 252, a threonine at position 254, and a glutamic acid at position 256, as numbered according to the EU numbering scheme. Thus, one or both Fc polypeptides may have M252Y, S254T, and T256E substitutions. Alternatively, one or both Fc polypeptides may have M428L and N434S substitutions, according to EU numbering. Alternatively, one or both Fc polypeptides may have N434S or N434A substitution.

### Fc Effector Functions

[0742] In some embodiments, one or both Fc polypeptides may comprise modifications that reduce effector function, i.e., having a reduced ability to induce certain biological functions upon binding to an Fc receptor expressed on an effector cell that mediates the effector function. Examples of antibody effector functions include, but are not limited to, C1q binding and complement dependent cytotoxicity (CDC), Fc receptor binding, antibody-dependent cell-mediated cytotoxicity (ADCC), antibody-dependent cell-mediated phagocytosis (ADCP), down-regulation of cell surface receptors (e.g., B cell receptor), and B-cell activation. Effector functions may vary with the antibody class. For example, native human IgG1 and IgG3 antibodies can elicit ADCC and CDC activities upon binding to an appropriate Fc receptor present on an immune system cell; and native human IgG1, IgG2, IgG3, and IgG4 can elicit ADCP functions upon binding to the appropriate Fc receptor present on an immune cell.

[0743] In some embodiments, one or both Fc polypeptides may also be engineered to contain other modifications for heterodimerization, e.g., electrostatic engineering of contact residues within a CH3-CH3 interface that are naturally charged or hydrophobic patch modifications.

[0744] In some embodiments, one or both Fc polypeptides may include additional modifications that modulate effector function.

[0745] In some embodiments, one or both Fc polypeptides may comprise modifications that reduce or eliminate effector function. Illustrative Fc polypeptide mutations that reduce effector function include, but are not limited to, substitutions in a CH2 domain, e.g., at positions 234 and 235, according to the EU numbering scheme. For example, in some embodiments, one or both Fc polypeptides can comprise alanine residues at positions 234 and 235. Thus, one or both Fc polypeptides may have L234A and L235A (LALA) substitutions.

[0746] Additional Fc polypeptide mutations that modulate an effector function include, but are not limited to, one or more substitutions at positions 238, 265, 269, 270, 297, 327 and 329, according to the EU numbering scheme. Illustrative substitutions include the following: position 329 may have a mutation in which proline is substituted with a glycine or arginine or an amino acid residue large enough to destroy the Fc/Fcγ receptor interface that is formed between proline 329 of the Fc and tryptophan residues Trp 87 and Trp 110 of FcγRIII. Additional illustrative substitutions include S228P, E233P, L235E, N297A, N297D, and P331S, according to the EU numbering scheme. Multiple substitutions may also be present, e.g., L234A and L235A of a human IgG1 Fc region; L234A, L235A, and P329G of a human IgG1 Fc region; S228P and L235E of a human IgG4 Fc region; L234A and G237A of a human IgG1 Fc region; L234A, L235A, and G237A of a human IgG1 Fc region; V234A and G237A of a human IgG2 Fc region; L235A, G237A, and E318A of a human IgG4 Fc region; and S228P and L236E of a human IgG4 Fc region, according to the EU numbering scheme. In some embodiments, one or both Fc polypeptides may have one or more amino acid substitutions that modulate ADCC, e.g., substitutions at positions 298, 333, and/or 334, according to the EU numbering scheme.

### Illustrative Fc Polypeptides Comprising Additional Mutations

[0747] By way of non-limiting example, one or both Fc polypeptides present in a fusion protein of the invention may comprise additional mutations including a knob mutation (e.g., T366W as numbered according to the EU numbering scheme), hole mutations (e.g., T366S, L368A, and Y407V as numbered according to the EU numbering scheme), mutations that modulate effector function (e.g., L234A, L235A, and/or P329G (e.g., L234A and L235A) as numbered according to the EU numbering scheme), and/or mutations that increase serum stability (e.g., (i) M252Y, S254T, and T256E as numbered according to the EU numbering scheme, or (ii) N434S with or without M428L as numbered with reference to EU numbering).

[0748] In some embodiments, an Fc polypeptide may have a knob mutation (e.g., T366W as numbered according to the EU numbering scheme) and at least 85% identity, at least 90% identity, or at least 95% identity to the sequence of any one of SEQ ID NOS:181, 184-270, 289-313, and 469-475. In some embodiments, an Fc polypeptide having the sequence of any one of SEQ ID NOS:181, 184-270, 289-313, and 469-475 may be modified to have a knob mutation.

[0749] In some embodiments, an Fc polypeptide may have a knob mutation (e.g., T366W as numbered according to the EU numbering scheme), mutations that modulate effector function (e.g., L234A, L235A, and/or P329G (e.g., L234A and L235A) as numbered according to the EU numbering scheme), and at least 85% identity, at least 90% identity, or at least 95% identity to the sequence of any one of SEQ ID NOS: 181, 184-270, 289-313, and 469-475. In some embodiments, an Fc polypeptide having the sequence of any one of SEQ ID NOS:181, 184-270, 289-313, and 469-475 may be modified to have a knob mutation and mutations that modulate effector function.

[0750] In some embodiments, an Fc polypeptide may have a knob mutation (e.g., T366W as numbered according to the EU numbering scheme), mutations that increase serum stability (e.g., (i) M252Y, S254T, and T256E as numbered according to the EU numbering scheme, or (ii) N434S with or without M428L as numbered with reference to EU numbering), and at least 85% identity, at least 90% identity, or at least 95% identity to the sequence of any one of SEQ ID NOS:181, 184-270, 289-313, and 469-475. In some embodiments, an Fc polypeptide having the sequence of any one of SEQ ID NOS: 181, 184-270, 289-313, and 469-475 may be modified to have a knob mutation and mutations that increase serum stability.

[0751] In some embodiments, an Fc polypeptide may have a knob mutation (e.g., T366W as numbered according to the EU numbering scheme), mutations that modulate effector function (e.g., L234A, L235A, and/or P329G (e.g., L234A and L235A) as numbered according to the EU numbering scheme), mutations that increase serum stability (e.g., (i) M252Y, S254T, and T256E as numbered according to the EU numbering scheme, or (ii) N434S with or without M428L as numbered with reference to EU numbering), and at least 85% identity, at least 90% identity, or at least 95% identity to the sequence of any one of SEQ ID NOS:181, 184-270, 289-313, and 469-475. In some embodiments, an Fc polypeptide having the sequence of any one of SEQ ID NOS:181, 184-270, 289-313, and 469-475 may be modified to have a knob mutation, mutations that modulate effector function, and mutations that increase serum stability.

[0752] In some embodiments, an Fc polypeptide may have hole mutations (e.g., T366S, L368A, and Y407V as numbered according to the EU numbering scheme) and at least 85% identity, at least 90% identity, or at least 95% identity to the sequence of any one of SEQ ID NOS:181, 184-270, 289-313, and 469-475. In some embodiments, an Fc polypeptide having the sequence of any one of SEQ ID NOS:181, 184-270, 289-313, and 469-475 may be modifed to have hole mutations.

[0753] In some embodiments, an Fc polypeptide may have hole mutations (e.g., T366S, L368A, and Y407V as numbered according to the EU numbering scheme), mutations that modulate effector function (e.g., L234A, L235A, and/or P329G (e.g., L234A and L235A) as numbered according to the EU numbering scheme), and at least 85% identity, at least 90% identity, or at least 95% identity to the sequence of any one of SEQ ID NOS:181, 184-270, 289-313, and 469-475. In some embodiments, an Fc polypeptide having the sequence of any one of SEQ ID NOS:181, 184-270, 289-313, and 469-475 may be modified to have hole mutations and mutations that modulate effector function.

[0754] In some embodiments, an Fc polypeptide may have hole mutations (e.g., T366S, L368A, and Y407V as numbered according to the EU numbering scheme), mutations that increase serum stability (e.g., (i) M252Y, S254T, and T256E as numbered according to the EU numbering scheme, or (ii) N434S with or without M428L as numbered with reference to EU numbering), and at least 85% identity, at least 90% identity, or at least 95% identity to the sequence of any one of SEQ ID NOS:181, 184-270, 289-313, and 469-475. In some embodiments, an Fc polypeptide having the sequence of any one of SEQ ID NOS:181, 184-270, 289-313, and 469-475 may be modified to have hole mutations and mutations that increase serum stability.

[0755] In some embodiments, an Fc polypeptide may have hole mutations (e.g., T366S, L368A, and Y407V as numbered according to the EU numbering scheme), mutations that modulate effector function (e.g., L234A, L235A, and/or P329G (e.g., L234A and L235A) as numbered according to the EU numbering scheme), mutations that increase serum stability (e.g., (i) M252Y, S254T, and T256E as numbered according to the EU numbering scheme, or (ii) N434S with or without M428L as numbered with reference to EU numbering), and at least 85% identity, at least 90% identity, or at least 95% identity to the sequence of any one of SEQ ID NOS:181, 184-270, 289-313, and 469-475. In some embodiments, an Fc polypeptide having the sequence of any one of SEQ ID NOS:181, 184-270, 289-313, and 469-475 may be modified to have hole mutations, mutations that modulate effector function, and mutations that increase serum stability.

### VII. Anti-Tau Antibodies Having Modified Fc Polypeptides

[0756] In some embodiments, an anti-Tau antibody described herein comprises a first Fc polypeptide having the knob (T366W according to EU numbering), LALA (L234A and L235A according to EU numbering), YTE (M252Y, S254T, and T256E according to EU numbering), and LS (N434S with or without M428L according to EU numbering) mutations as specified for each of SEQ ID NOS:271-274, 476, 477, and 559-561 and at least 85% identity, at least 90% identity, or at least 95% identity to the respective sequence, and a second Fc polypeptide having the sequence of SEQ ID NO:279. In some embodiments, an anti-Tau antibody described herein comprises a first Fc polypeptide having the sequence of any one of SEQ ID NOS:214-218, 238, 240-270, and 469-475 with a knob mutation (e.g., T366W substitution according to EU numbering), and a second Fc polypeptide having the sequence of SEQ ID NO:279. In some embodiments, an anti-Tau antibody described herein comprises a first Fc polypeptide having the sequence of SEQ ID NO:271 and a second Fc polypeptide having the sequence of SEQ ID NO:279. In some embodiments, an anti-Tau antibody described herein comprises a first Fc polypeptide having the sequence of SEQ ID NO:272 and a second Fc polypeptide having the sequence of SEQ ID NO:280. In some embodiments, an anti-Tau antibody described herein comprises a first Fc polypeptide having the sequence of SEQ ID NO:273 and a second Fc polypeptide having the sequence of SEQ ID NO:281. In some embodiments, an anti-Tau antibody described herein comprises a first Fc polypeptide having the sequence of SEQ ID NO:274 and a second Fc polypeptide having the sequence of SEQ ID NO:282.

[0757] In some embodiments, an anti-Tau antibody described herein comprises a first Fc polypeptide having the hole (T366S, L368A, and Y407V according to EU numbering), LALA (L234A and L235A according to EU numbering), YTE (M252Y, S254T, and T256E according to EU numbering), and LS (N434S with or without M428L according to EU numbering) mutations as specified for each of SEQ ID NOS:275-278, 478, 479, and 562-564 and has at least 85% identity, at least 90% identity, or at least 95% identity to the respective sequence, and a second Fc polypeptide having the sequence of SEQ ID NO:283. In some embodiments, an anti-Tau antibody described herein comprises a first Fc polypeptide having the sequence of any one of SEQ ID NOS:214-218, 238, 240-270, and 469-475 with a hole mutation (e.g., T366S, L368A, and/or Y407V substitutions according to EU numbering), and a second Fc polypeptide having the sequence of SEQ ID NO:283. In some embodiments, an anti-Tau antibody described herein comprises a first Fc polypeptide having the sequence of SEQ ID NO:275 and a second Fc polypeptide having the sequence of SEQ ID NO:283. In some embodiments, an anti-Tau antibody described herein comprises a first Fc polypeptide having the sequence of SEQ ID NO:276 and a second Fc polypeptide having the sequence of SEQ ID NO:284. In some embodiments, an anti-Tau antibody described herein comprises a first Fc polypeptide having the sequence of SEQ ID NO:277 and a second Fc polypeptide having the sequence of SEQ ID NO:285. In some embodiments, an anti-Tau antibody described herein comprises a first Fc polypeptide having the sequence of SEQ ID NO:278 and a second Fc polypeptide having the sequence of SEQ ID NO:286.

[0758] In some embodiments, an anti-Tau antibody described herein comprises a first Fc polypeptide having the knob (T366W according to EU numbering), LALA (L234A and L235A according to EU numbering), YTE (M252Y, S254T, and T256E according to EU numbering), and LS (N434S with or without M428L according to EU numbering) mutations as specified for each of SEQ ID NOS:271-274, 476, 477, and 559-561 and at least 85% identity, at least 90% identity, or at least 95% identity to the respective sequence, and a second Fc polypeptide having the hole (T366S, L368A, and Y407V according to EU numbering), LALA (L234A and L235A according to EU numbering), YTE (M252Y, S254T, and T256E according to EU numbering), and LS (N434S with or without M428L according to EU numbering) mutations as specified for each of SEQ ID NOS:275-278, 478, 479, and 562-564 and has at least 85% identity, at least 90% identity, or at least 95% identity to the respective sequence. In some embodiments, an anti-Tau antibody described herein comprises a first Fc polypeptide having the sequence of any one of SEQ ID NOS:214-218, 238, 240-270, and 469-475 with a knob mutation (e.g., T366W substitution according to EU numbering), and a second Fc polypeptide having the sequence of any one of SEQ ID NOS:214-218, 238, 240-270, and 469-475 with a hole mutation (e.g., T366S, L368A, and/or Y407V substitutions according to EU numbering). In some embodiments, an anti-Tau antibody described herein comprises a first Fc polypeptide having the sequence of SEQ ID NO:271 and a second Fc polypeptide having the sequence of SEQ ID NO:275. In some embodiments, an anti-Tau antibody described herein comprises a first Fc polypeptide having the sequence of SEQ ID NO:272 and a second Fc polypeptide having the sequence of SEQ ID NO:276. In some embodiments, an anti-Tau antibody described herein comprises a first Fc polypeptide having the sequence of SEQ ID NO:273 and a second Fc polypeptide having the sequence of SEQ ID NO:277. In some embodiments, an anti-Tau antibody described herein comprises a first Fc polypeptide having the sequence of SEQ ID NO:274 and a second Fc polypeptide having the sequence of SEQ ID NO:278.

[0759] In some embodiments, an anti-Tau antibody described herein comprises a first Fc polypeptide having the knob (T366W according to EU numbering), LALA (L234A and L235A according to EU numbering), YTE (M252Y, S254T, and T256E according to EU numbering), and LS (N434S with or without M428L according to EU numbering) mutations as specified for each of SEQ ID NOS:283-286 and 626-628 and has at least 85% identity, at least 90% identity, or at least 95% identity to the respective sequence, and a second Fc polypeptide having the hole (T366S, L368A, and Y407V according to EU numbering), LALA (L234A and L235A according to EU numbering), and YTE (M252Y, S254T, and T256E according to EU numbering) mutations as specified for each of SEQ ID NOS:279-282 and 629-631 and has at least 85% identity, at least 90% identity, or at least 95% identity to the respective sequence. In some embodiments, an anti-Tau antibody described herein comprises a first Fc polypeptide having the sequence of SEQ ID NO:283 and a second Fc polypeptide having the sequence of SEQ ID NO:279. In some embodiments, an anti-Tau antibody described herein comprises a first Fc polypeptide having the sequence of SEQ ID NO:284 and a second Fc polypeptide having the sequence of SEQ ID NO:280. In some embodiments, an anti-Tau antibody described herein comprises a first Fc polypeptide having the sequence of SEQ ID NO:285 and a second Fc polypeptide having the sequence of SEQ ID NO:281. In some embodiments, an anti-Tau antibody described herein comprises a first Fc polypeptide having the sequence of SEQ ID NO:286 and a second Fc polypeptide having the sequence of SEQ ID NO:282.

[0760] In any of the embodiments described above, the anti-Tau antibody may comprise a heavy chain CDR1-3 and a light chain CDR1-3 comprising the amino acid sequences of SEQ ID NOS:22, 23, 24, 26, 27, and 28, respectively.

[0761] In some embodiments, an anti-Tau antibody comprises a light chain having the light chain CDR1-3 (SEQ ID NOS:26-28) and at least 85% identity, at least 90% identity, or at least 95% identity to the sequence of SEQ ID NO:315, a first heavy chain having the heavy chain CDR1-3 (SEQ ID NOS:22-24), knob (T366W according to EU numbering), LALA (L234A and L235A according to EU numbering), P329G, and/or YTE (M252Y, S254T, and T256E according to EU numbering) mutations as specified for the sequence of SEQ ID NO:317, and a second heavy chain having the heavy chain CDR1-3 (SEQ ID NOS:22-24), hole (T366S, L368A, and Y407V according to EU numbering), LALA (L234A and L235A according to EU numbering), P329G, and/or YTE (M252Y, S254T, and T256E according to EU numbering) mutations as specified for the sequence of SEQ ID NO:316. In some embodiments, an anti-Tau antibody comprises a light chain having the sequence of SEQ ID NO:315, a first heavy chain having the sequence of SEQ ID NO:317, and a second heavy chain having the sequence of SEQ ID NO:316.

[0762] In some embodiments, an anti-Tau antibody comprises a light chain having the light chain CDR1-3 (SEQ ID NOS:26-28) and at least 85% identity, at least 90% identity, or at least 95% identity to the sequence of SEQ ID NO:315, a first heavy chain having the heavy chain CDR1-3 (SEQ ID NOS:22-24), knob (T366W according to EU numbering), LALA (L234A and L235A according to EU numbering), P329G, and/or YTE (M252Y, S254T, and T256E according to EU numbering) mutations as specified for each sequence of any one of SEQ ID NOS:317-322 and at least 85% identity, at least 90% identity, or at least 95% identity to the respective sequence, and a second heavy chain having the heavy chain CDR1-3 (SEQ ID NOS:22-24), hole (T366S, L368A, and Y407V according to EU numbering), LALA (L234A and L235A according to EU numbering), P329G, and/or YTE (M252Y, S254T, and T256E according to EU numbering) mutations as specified for each sequence of any one of SEQ ID NOS:316 and 329-333 and at least 85% identity, at least 90% identity, or at least 95% identity to the respective sequence. In some embodiments, an anti-Tau antibody comprises a light chain having the sequence of SEQ ID NO:315, a first heavy chain having the sequence of any one of SEQ ID NOS:317-322, and a second heavy chain having the sequence of any one of SEQ ID NOS:316 and 329-333.

[0763] In some embodiments, an anti-Tau antibody comprises a light chain having the light chain CDR1-3 (SEQ ID NOS:26-28) and at least 85% identity, at least 90% identity, or at least 95% identity to the sequence of SEQ ID NO:315, a first heavy chain having the heavy chain CDR1-3 (SEQ ID NOS:22-24), hole (T366S, L368A, and Y407V according to EU numbering), LALA (L234A and L235A according to EU numbering), P329G, and/or YTE (M252Y, S254T, and T256E according to EU numbering) mutations as specified for each sequence of any one of SEQ ID NOS:323-328 and at least 85% identity, at least 90% identity, or at least 95% identity to the respective sequence, and a second heavy chain having the heavy chain CDR1-3 (SEQ ID NOS:22-24), knob (T366W according to EU numbering), LALA (L234A and L235A according to EU numbering), P329G, and/or YTE (M252Y, S254T, and T256E according to EU numbering) mutations as specified for each sequence of any one of SEQ ID NOS:334-339 and at least 85% identity, at least 90% identity, or at least 95% identity to the respective sequence. In some embodiments, an anti-Tau antibody comprises a light chain having the sequence of SEQ ID NO:315, a first heavy chain having the sequence of any one of SEQ ID NOS:323-328, and a second heavy chain having the sequence of any one of SEQ ID NOS:334-339.

[0764] In some embodiments, an anti-Tau antibody comprises a light chain having the light chain CDR1-3 (SEQ ID NOS:26-28) and at least 85% identity, at least 90% identity, or at least 95% identity to the sequence of SEQ ID NO:315, a first heavy chain having the heavy chain CDR1-3 (SEQ ID NOS:22-24), knob (T366W according to EU numbering), LALA (L234A and L235A according to EU numbering), P329G, and/or YTE (M252Y, S254T, and T256E according to EU numbering) mutations as specified for each sequence of any one of SEQ ID NOS:317-322 and at least 85% identity, at least 90% identity, or at least 95% identity to the respective sequence, and a second heavy chain having the heavy chain CDR1-3 (SEQ ID NOS:22-24), hole (T366S, L368A, and Y407V according to EU numbering), LALA (L234A and L235A according to EU numbering), P329G, and/or YTE (M252Y, S254T, and T256E according to EU numbering) mutations as specified for each sequence of any one of SEQ ID NOS:323-328 and at least 85% identity, at least 90% identity, or at least 95% identity to the respective sequence. In some embodiments, an anti-Tau antibody comprises a light chain having the sequence of SEQ ID NO:315, a first heavy chain having the sequence of any one of SEQ ID NOS:317-322, and a second heavy chain having the sequence of any one of SEQ ID NOS:323-328.

[0765] In some embodiments, an anti-Tau antibody comprises a light chain having the light chain CDR1-3 (SEQ ID NOS:26-28) and at least 85% identity, at least 90% identity, or at least 95% identity to the sequence of SEQ ID NO:315, a first heavy chain having the heavy chain CDR1-3 (SEQ ID NOS:22-24), knob (T366W according to EU numbering), LALA (L234A and L235A according to EU numbering), P329G, and/or YTE (M252Y, S254T, and T256E according to EU numbering) mutations as specified for each sequence of any one of SEQ ID NOS:334-339 and at least 85% identity, at least 90% identity, or at least 95% identity to the respective sequence, and a second heavy chain having the heavy chain CDR1-3 (SEQ ID NOS:22-24), hole (T366S, L368A, and Y407V according to EU numbering), LALA (L234A and L235A according to EU numbering), P329G, and/or YTE (M252Y, S254T, and T256E according to EU numbering) mutations as specified for each sequence of any one of SEQ ID NOS:316 and 329-333 and at least 85% identity, at least 90% identity, or at least 95% identity to the respective sequence. In some embodiments, an anti-Tau antibody comprises a light chain having the sequence of SEQ ID NO:315, a first heavy chain having the sequence of any one of SEQ ID NOS:334-339, and a second heavy chain having the sequence of any one of SEQ ID NOS:316 and 329-333.

[0766] In further embodiments, an anti-Tau antibody comprises a light chain having the light chain CDR1-3 (SEQ ID NOS:26-28) and at least 85% identity, at least 90% identity, or at least 95% identity to the sequence of SEQ ID NO:315, and a heavy chain having the heavy chain CDR1-3 (SEQ ID NOS:22-24) and at least 85% identity, at least 90% identity, or at least 95% identity to the sequence of any one of SEQ ID NOS:414-419. In some embodiments, the heavy chain comprises a modified Fc polypeptide having a knob mutation (e.g., T366W according to EU numbering), hole mutations (e.g., T366S, L368A, and Y407V according to EU numbering), mutations that modulate effector function (e.g., L234A, L235A, and/or P329G (e.g., L234A and L235A) according to EU numbering), and/or mutations that increase serum stability (e.g., (i) M252Y, S254T, and T256E according to EU numbering, or (ii) N434S with or without M428L according to EU numbering).

[0767] In particular embodiments, a heavy chain having the sequence of any one of SEQ ID NOS:414-419 may be modified to contain the knob mutation T366W, mutations that modulate effector function L234A, L235A, and/or P329G (e.g., L234A and L235A), and/or mutations that incrase serum stability (i) M252Y, S254T, and T256E, or (ii) N434S with or without M428L according to EU numbering.

[0768] In particular embodiments, a heavy chain having the sequence of any one of SEQ ID NOS:414-419 may be modified to contain hole mutations T366S, L368A, and Y407V, mutations that modulate effector function L234A, L235A, and/or P329G (e.g., L234A and L235A), and/or mutations that incrase serum stability (i) M252Y, S254T, and T256E, or (ii) N434S with or without M428L according to EU numbering.

[0769] In any of the embodiments described above, the anti-Tau antibody may comprise:
[0770] (a) a heavy chain CDR1 comprising an amino acid sequence that has at least 90% sequence identity (e.g., at least 91%, at least 92%, at least 93%, at least 94%, at least 95%, at least 96%, at least 97%, at least 98%, or at least 99% sequence identity) to any one of SEQ ID NOS:22, 150-154, and 420-437;
[0771] (b) a heavy chain CDR2 comprising an amino acid sequence that has at least 90% sequence identity (e.g., at least 91%, at least 92%, at least 93%, at least 94%, at least 95%, at least 96%, at least 97%, at least 98%, or at least 99% sequence identity) to any one of SEQ ID NOS:23 and 438-443;
[0772] (c) a heavy chain CDR3 comprising an amino acid sequence that has at least 90% sequence identity (e.g., at least 91%, at least 92%, at least 93%, at least 94%, at least 95%, at least 96%, at least 97%, at least 98%, or at least 99% sequence identity) to any one of SEQ ID NOS:24 and 155;
[0773] (d) a light chain CDR1 comprising an amino acid sequence that has at least 90% sequence identity (e.g., at least 91%, at least 92%, at least 93%, at least 94%, at least 95%, at least 96%, at least 97%, at least 98%, or at least 99% sequence identity) to any one of SEQ ID NOS:26, 156-158, and 444-459;
[0774] (e) a light chain CDR2 comprising an amino acid sequence that has at least 90% sequence identity (e.g., at least 91%, at least 92%, at least 93%, at least 94%, at least 95%, at least 96%, at least 97%, at least 98%, or at least 99% sequence identity) to SEQ ID NO:27; and
[0775] (f) a light chain CDR3 comprising an amino acid sequence that has at least 90% sequence identity (e.g., at least 91%, at least 92%, at least 93%, at least 94%, at least 95%, at least 96%, at least 97%, at least 98%, or at least 99% sequence identity) to any one of SEQ ID NOS:28, 159-162, and 460-462.

### VIII. Therapeutic Methods Using Anti-Tau Antibodies

[0776] In another aspect, methods for the use of anti-Tau antibodies as described herein are provided. In some embodiments, an anti-Tau antibody as described in Section III above is used in the practice of the methods described herein.

[0777] In some embodiments, methods of preventing or reducing pathological Tau seeding and/or spreading are provided. In some embodiments, the method comprises inhibiting, preventing, or reducing pathological Tau seeding and/or spreading in a subject, e.g., in a brain of a subject. In some embodiments, the method comprises administering to the subject an anti-Tau antibody or antigen-binding portion thereof as described herein, a pharmaceutical composition comprising an anti-Tau antibody as described herein, or a multispecific (e.g., bispecific) antibody comprising an anti-Tau antibody as described herein. In some embodiments, the subject is an individual having a tauopathy.

[0778] In some embodiments, methods of preventing, reducing, or inhibiting Tau oligomerization are provided. In some embodiments, the method comprises preventing, reducing, or inhibiting Tau oligomerization in a subject, e.g., in a brain of a subject. In some embodiments, the method comprises administering to the subject an anti-Tau antibody or antigen-binding portion thereof as described herein, a pharmaceutical composition comprising an anti-Tau antibody as described herein, or a multispecific (e.g., bispecific) antibody comprising an anti-Tau antibody as described herein. In some embodiments, the subject is an individual having a tauopathy.

[0779] In some embodiments, methods of preventing, reducing, or inhibiting Tau aggregation are provided. In some embodiments, the method comprises preventing, reducing, or inhibiting Tau aggregation in a subject, e.g., in a brain of a subject. In some embodiments, the method comprises administering to the subject an anti-Tau antibody or antigen-binding portion thereof as described herein, a pharmaceutical composition comprising an anti-Tau antibody as described herein, or a multispecific (e.g., bispecific) antibody comprising an anti-Tau antibody as described herein. In some embodiments, the subject is an individual having a tauopathy.

[0780] In some embodiments, methods of treating a tauopathy are provided. In some embodiments, the method comprises administering to a subject having a tauopathy an anti-Tau antibody or antigen-binding portion thereof as described herein, a pharmaceutical composition comprising an anti-Tau antibody as described herein, or a multispecific (e.g., bispecific) antibody comprising an anti-Tau antibody as described herein.

[0781] In some embodiments, methods of treating a neurodegenerative disease are provided. In some embodiments, the neurodegenerative disease is a tauopathy. In some embodiments, the tauopathy is a neurodegenerative tauopathy selected from the group consisting of Alzheimer's disease, primary age-related tauopathy, progressive supranuclear palsy (PSP), frontotemporal dementia, frontotemporal dementia with parkinsonism linked to chromosome 17, argyrophilic grain dementia, amyotrophic lateral sclerosis/parkinsonism-dementia complex of Guam, corticobasal degeneration, chronic traumatic encephalopathy, Creutzfeldt-Jakob disease, dementia pugilistica, diffuse neurofibrillary tangles with calcification, Down's syndrome, familial British dementia, familial Danish dementia, Gerstmann-Straussler-Scheinker disease, globular glial tauopathy, Guadeloupean parkinsonism with dementia, Guadelopean PSP, Hallevorden-Spatz disease, inclusion-body myositis, multiple system atrophy, myotonic dystrophy, neurofibrillary tangle-predominant dementia, Niemann-Pick disease type C, pallido-ponto-nigral degeneration, Parkinson's disease, Pick's disease, postencephalitic parkinsonism, prion protein cerebral amyloid angiopathy, progressive subcortical gliosis, subacute sclerosing panencephalitis, Huntington's disease, and tangle only dementia. In some embodiments, the neurodegenerative tauopathy is Alzheimer's disease. In some embodiments, the neurodegenerative tauopathy is frontotemporal dementia. In some embodiments, the neurodegenerative tauopathy is progressive supranuclear palsy.

[0782] In some embodiments, an anti-Tau antibody (or antigen-binding fragment, multispecific antibody, or pharmaceutical composition) as described herein is used in treating Alzheimer's disease. In some embodiments, the anti-Tau antibody is used in treating prodromal Alzheimer's disease. In some embodiments, the anti-Tau antibody is used in treating mild Alzheimer's disease (an early-stage form of the disease). In some embodiments, the anti-Tau antibody is used in treating moderate Alzheimer's disease (a middle-stage form of the disease). In some embodiments, the anti-Tau antibody is used in treating severe Alzheimer's disease (a late-stage form of the disease). In some embodiments, the anti-Tau antibody is used in treating early-onset Alzheimer's disease. In some embodiments, the anti-Tau antibody is used in treating late-onset Alzheimer's disease.

[0783] In some embodiments, the subject to be treated is a human, e.g., a human adult or a human child.

[0784] In some embodiments, the method further comprises administering to the subject one or more other therapeutic agents. In some embodiments, the method comprises administering to the subject an agent, e.g., an antibody, that binds to amyloid β peptides or prevents the aggregation of amyloid β peptides. In some embodiments, the method comprises administering to the subject an antibody against amyloid β (Aβ), including but not limited to aducanumab, bapineuzumab, solanezumab, and gantenerumab. In some embodiments, the method comprises administering to the subject a β-site Amyloid precursor protein Cleaving Enzyme 1 (BACE1) inhibitor, including but not limited to verubecestat. In some embodiments, the method comprises administering to the subject an α-synuclein antibody. In some embodiments, the method comprises administering to the subject a neuroprotective agent. In some embodiments, the neuroprotective agent is an anticholinergic agent, a dopaminergic agent, a glutamatergic agent, a histone deacetylase (HDAC) inhibitor, a cannabinoid, a caspase inhibitor, melatonin, an anti-inflammatory agent, a hormone (e.g., estrogen or progesterone), or a vitamin. In some embodiments, the method comprises administering to the subject an agent for use in treating a cognitive or behavioral symptom of a tauopathy (e.g., an antidepressant, a dopamine agonist, or an anti-psychotic).

[0785] In some embodiments, an anti-Tau antibody is administered to a subject at a therapeutically effective amount or dose. A daily dose range of about 0.01 mg/kg to about 500 mg/kg, or about 0.1 mg/kg to about 200 mg/kg, or about 1 mg/kg to about 100 mg/kg, or about 10 mg/kg to about 50 mg/kg, can be used. The dosages, however, may be varied according to several factors, including the chosen route of administration, the formulation of the composition, patient response, the severity of the condition, the subject's weight, and the judgment of the prescribing physician. The dosage can be increased or decreased over time, as required by an individual patient. In certain instances, a patient initially is given a low dose, which is then increased to an efficacious dosage tolerable to the patient. Determination of an effective amount is well within the capability of those skilled in the art.

[0786] The route of administration of an anti-Tau antibody (or antigen-binding fragment, multispecific antibody, or pharmaceutical composition) as described herein can be oral, intraperitoneal, transdermal, subcutaneous, intravenous, intramuscular, intrathecal, inhalational, topical, intralesional, rectal, intrabronchial, nasal, transmucosal, intestinal, ocular or otic delivery, or any other methods known in the art. In some embodiments, the antibody is administered orally, intravenously, or intraperitoneally.

[0787] Co-administered agents (e.g., the anti-Tau antibody and another therapeutic agent) can be administered together or separately, simultaneously or at different times. When administered, the therapeutic agents independently can be administered once, twice, three, four times daily or more or less often, as needed. In some embodiments, the administered therapeutic agents are administered once daily. In some embodiments, the administered therapeutic agents are administered at the same time or times, for instance as an admixture. In some embodiments, one or more of the therapeutic agents is administered in a sustained-release formulation.

[0788] In some embodiments, the anti-Tau antibody and another therapeutic agent are administered concurrently. In some embodiments, the anti-Tau antibody and another therapeutic agent are administered sequentially. For example, in some embodiments an anti-Tau antibody is administered first, for example for about 1, 2, 3, 4, 5, 6, 7, 8, 9, 10, 15, 20, 25, 30, 40, 50, 60, 70, 80, 90, 100 days or more prior to administering another therapeutic agent. In some embodiments, the other therapeutic agent is administered first, for example, for about 1, 2, 3, 4, 5, 6, 7, 8, 9, 10, 15, 20, 25, 30, 40, 50, 60, 70, 80, 90, 100 days or more prior to administering an anti-Tau antibody.

[0789] In some embodiments, the anti-Tau antibody (and optionally another therapeutic agent) is administered to the subject over an extended period of time, e.g., for at least 30, 40, 50, 60, 70, 80, 90, 100, 150, 200, 250, 300, 350 days or longer.

### IX. Pharmaceutical Compositions and Kits

[0790] In another aspect, pharmaceutical compositions and kits comprising an antibody that specifically binds to a human Tau protein are provided. In some embodiments, the pharmaceutical compositions and kits are for use in preventing or reducing pathological Tau seeding and/or spreading, e.g., in a brain of a subject. In some embodiments, the pharmaceutical compositions and kits are for use in treating a tauopathy.

### Pharmaceutical Compositions

[0791] In some embodiments, pharmaceutical compositions comprising an anti-Tau antibody are provided. In some embodiments, the anti-Tau antibody is an antibody (or antigen-binding fragment or multispecific antibody) as described in Section III above.

[0792] In some embodiments, a pharmaceutical composition comprises an anti-Tau antibody as described herein and further comprises one or more pharmaceutically acceptable carriers and/or excipients. A pharmaceutically acceptable carrier includes any solvents, dispersion media, or coatings that are physiologically compatible and that preferably does not interfere with or otherwise inhibit the activity of the active agent. Various pharmaceutically acceptable excipients are well-known in the art.

[0793] In some embodiments, the carrier is suitable for intravenous, intramuscular, oral, intraperitoneal, intrathecal, transdermal, topical, or subcutaneous administration. Pharmaceutically acceptable carriers can contain one or more physiologically acceptable compound(s) that act, for example, to stabilize the composition or to increase or decrease the absorption of the active agent(s). Physiologically acceptable compounds can include, for example, carbohydrates, such as glucose, sucrose, or dextrans, antioxidants, such as ascorbic acid or glutathione, chelating agents, low molecular weight proteins, compositions that reduce the clearance or hydrolysis of the active agents, or excipients or other stabilizers and/or buffers. Other pharmaceutically acceptable carriers and their formulations are well-known in the art.

[0794] The pharmaceutical compositions described herein can be manufactured in a manner that is known to those of skill in the art, e.g., by means of conventional mixing, dissolving, granulating, dragee-making, emulsifying, encapsulating, entrapping or lyophilizing processes. The following methods and excipients are merely exemplary and are in no way limiting.

[0795] For oral administration, an anti-Tau antibody can be formulated by combining it with pharmaceutically acceptable carriers that are well-known in the art. Such carriers enable the compounds to be formulated as tablets, pills, dragees, capsules, emulsions, lipophilic and hydrophilic suspensions, liquids, gels, syrups, slurries, suspensions and the like, for oral ingestion by a patient to be treated. Pharmaceutical preparations for oral use can be obtained by mixing the compounds with a solid excipient, optionally grinding a resulting mixture, and processing the mixture of granules, after adding suitable auxiliaries, if desired, to obtain tablets or dragee cores. Suitable excipients include, for example, fillers such as sugars, including lactose, sucrose, mannitol, or sorbitol; cellulose preparations such as, for example, maize starch, wheat starch, rice starch, potato starch, gelatin, gum tragacanth, methyl cellulose, hydroxypropylmethyl-cellulose, sodium carboxymethylcellulose, and/or polyvinylpyrrolidone (PVP). If desired, disintegrating agents can be added, such as a cross-linked polyvinyl pyrrolidone, agar, or alginic acid or a salt thereof such as sodium alginate.

[0796] An anti-Tau antibody can be formulated for parenteral administration by injection, e.g., by bolus injection or continuous infusion. For injection, the compound or compounds can be formulated into preparations by dissolving, suspending or emulsifying them in an aqueous or nonaqueous solvent, such as vegetable or other similar oils, synthetic aliphatic acid glycerides, esters of higher aliphatic acids or propylene glycol; and if desired, with conventional additives such as solubilizers, isotonic agents, suspending agents, emulsifying agents, stabilizers and preservatives. In some embodiments, compounds can be formulated in aqueous solutions, preferably in physiologically compatible buffers such as Hanks's solution, Ringer's solution, or physiological saline buffer. Formulations for injection can be presented in unit dosage form, e.g., in ampules or in multi-dose containers, with an added preservative. The compositions can take such forms as suspensions, solutions or emulsions in oily or aqueous vehicles, and can contain formulatory agents such as suspending, stabilizing and/or dispersing agents.

[0797] In some embodiments, an anti-Tau antibody is prepared for delivery in a sustained-release, controlled release, extended-release, timed-release or delayed-release formulation, for example, in semi-permeable matrices of solid hydrophobic polymers containing the active agent. Various types of sustained-release materials have been established and are well-known by those skilled in the art. Current extended-release formulations include film-coated tablets, multiparticulate or pellet systems, matrix technologies using hydrophilic or lipophilic materials and wax-based tablets with pore-forming excipients. Sustained-release delivery systems can, depending on their design, release the compounds over the course of hours or days, for instance, over 4, 6, 8, 10, 12, 16, 20, 24 hours or more. Usually, sustained release formulations can be prepared using naturally occurring or synthetic polymers, for instance, polymeric vinyl pyrrolidones, such as polyvinyl pyrrolidone (PVP); carboxyvinyl hydrophilic polymers; hydrophobic and/or hydrophilic hydrocolloids, such as methylcellulose, ethylcellulose, hydroxypropylcellulose, and hydroxypropylmethylcellulose; and carboxypolymethylene.

[0798] Typically, a pharmaceutical composition for use in in vivo administration is sterile. Sterilization can be accomplished according to methods known in the art, e.g., heat sterilization, steam sterilization, sterile filtration, or irradiation.

[0799] Dosages and desired drug concentration of pharmaceutical compositions of the disclosure may vary depending on the particular use envisioned. The determination of the appropriate dosage or route of administration is well within the skill of one in the art. Suitable dosages are also described in Section VIII above.

### Kits

[0800] In some embodiments, kits comprising an anti-Tau antibody (or antigen-binding fragment or multispecific antibody) as described herein (e.g., as described in Section III above) are provided. In some embodiments, the kits are for use in preventing or reducing pathological Tau seeding and/or spreading, e.g., in a brain of a subject. In some embodiments, the pharmaceutical compositions and kits are for use in treating a tauopathy, e.g., a neurodegenerative tauopathy.

[0801] In some embodiments, the kit further comprises one or more additional therapeutic agents. For example, in some embodiments, the kit comprises an anti-Tau antibody as described herein and further comprises one or more additional therapeutic agents for use in the treatment of a tauopathy. In some embodiments, the therapeutic agent is an agent for use in treating a cognitive or behavioral symptom of a tauopathy (e.g., an antidepressant, a dopamine agonist, or an anti-psychotic). In some embodiments, the therapeutic agent is a neuroprotective agent (e.g., an anticholinergic agent, a dopaminergic agent, a glutamatergic agent, a histone deacetylase (HDAC) inhibitor, a cannabinoid, a caspase inhibitor, melatonin, an anti-inflammatory agent, a hormone (e.g., estrogen or progesterone), or a vitamin). In some embodiments, the therapeutic agent is an agent, e.g., an antibody, that binds to amyloid β peptides or prevents the aggregation of amyloid β peptides.

[0802] In some embodiments, the kit further comprises instructional materials containing directions (i.e., protocols) for the practice of the methods described herein (e.g., instructions for using the kit for treating a tauopathy). While the instructional materials typically comprise written or printed materials they are not limited to such. Any medium capable of storing such instructions and communicating them to an end user is contemplated by this invention. Such media include, but are not limited to electronic storage media (e.g., magnetic discs, tapes, cartridges, chips), optical media (e.g., CD-ROM), and the like. Such media may include addresses to internet sites that provide such instructional materials.

### X. Examples

[0803] The present invention will be described in greater detail by way of specific examples. The following examples are offered for illustrative purposes only, and are not intended to limit the invention in any manner.

### Example 1. Anti-Tau Antibody Discovery and Screening

[0804] This example describes the design, generation, and characterization of antibodies that specifically bind to multiple Tau splice isoforms and that specifically bind to both phosphorylated human Tau and unphosphorylated human Tau. The antibodies also exhibit cross-species reactivity between human Tau and cynomolgus Tau, and in some cases, mouse Tau.

[0805] A schematic for the anti-Tau antibody discovery and screening program is shown in FIG. 1. As detailed below, mice were immunized with recombinant Tau (r-Tau) and/or hyperphosphorylated Tau (p-Tau), splenocytes and lympohocytes were harvested, and RNA was extracted to generate cDNA. Subsequently, a phage library was generated by amplification of V-genes and assembly as Fab fragments fused to the phage coat protein pIII in a phagemid vector, and panned against r-Tau. Recombinant Fab fragments were then generated against r-Tau and p-Tau. Anti-Tau antibodies were selected using ELISA to screen for antibodies that bound to all of the human Tau splice isoforms 0N3R, 1N3R, 2N3R, 0N4R, 1N4R, and 2N4R and that exhibited binding to cynomolgus (cyno) Tau. Positive hits from the ELISA screens were sequenced, and the sequences were used to generate chimeric IgGs. The chimeric antibody clones were tested for binding affinity and binding characteristics and epitope mapping of high-affinity antibodies was performed.

### Antigen Production

### Recombinant Tau

[0806] Full length (441 amino acid in length) recombinant Tau (r-Tau) was produced in E. coli BL21(DE3) cells. r-Tau was expressed with a His6-Smt3 tag (FIG. 2A), which was used for affinity purification and subsequently cleaved and removed using ubiquitin-like-specific protease 1 (Ulp1). FIG. 2B shows an SDS-PAGE gel of the original and cleaved product. FIG. 2C shows an SDS-PAGE gel of the final purified r-Tau antigen.

In Vitro r-Tau Phosphorylation

[0807] Recombinant Tau (r-Tau) was phosphorylated in vitro by incubation with 1:1 amounts of PKA and GSK3β in 50 mM MES, pH 6.8, 100 mM NaCl, 0.5 mM EGTA, 5 mM MgCl₂ and 1 mM ATP for 24 hours at room temperature. Phosphorylated r-Tau was then purified to remove kinases and endotoxins. Phosphorylation of r-Tau was confirmed as shown in FIG. 2D.

### Immunization of Mice

[0808] NZBW mice were immunized with recombinant Tau (r-Tau), recombinant hyperphosphorylated Tau (p-Tau), or alternating injections of either antigen. Immunizations were performed via Hock or footpad weekly with 5-10 μg of antigen in Ribi or Freund's adjuvant until serum antibody against r-Tau or p-Tau reacted in an ELISA to a dilution of greater than 10⁵, typically at around six to eight weeks. Mice were given a final boost without adjuvant via intraperitoneal injection and sacrificed 3 days after the boost. Spleens and popliteal and inguinal lymph nodes were harvested, made into single cell suspensions by passing through cell strainers, and then the splenocytes and lymphocytes were flash frozen in liquid nitrogen.

Purification of RNA and Generation of cDNA from Splenocytes and Lymphocytes

[0809] Cell pellets from frozen splenocytes or lymphocytes were thawed on ice and resuspended in 1 mL TRIzol™. The solution was incubated at room temperature for 5 minutes, then 0.2 mL of chloroform was added and the tubes were shaken vigorously for 15 seconds. The tubes were spun at 20×g for 15 minutes at 4° C. to separate the phases. The colorless aqueous phase was carefully removed leaving the white interphase and the pink chloroform phase. RNA was precipitated by addition of 0.6 mL of isopropanol, mixing by inversion, and then spinning at 20×g for 15 minutes at 4° C. The supernatant was discarded and the pellet was washed with 75% ethanol and dissolved in DEPC-treated water. cDNA was generated from the total RNA using SuperScript™ III reverse transcriptase (obtained from Thermo Fisher) using the manufacturer's recommended protocol for priming with oligo-dT.

### Generation of Immunized Phage Display Libraries

[0810] PCR reactions were carried out to amplify V genes for heavy or light chain variable regions using primers specific for the respective mouse germline genes. The PCR products were purified by agarose gel. VH-CH1 fragments were generated by a joining PCR reaction using the VH products and DNA for human CH1 region along with end primers. VL-CL fragments were generated by a joining PCR reaction using the VL products and DNA for the human kappa region along with end primers. The respective fragments were purified by agarose gel. A final PCR reaction was carried out to join the VH-CH1 and VL-CL fragments, and the resulting DNA encoding Fab was again purified by agarose gel, then digested with SfiI restriction enzyme. The digested Fab fragment was ligated into the SfiI-digested phagemid vector overnight at 16° C., and the ligation product was purified by ethanol precipitation. Electrocompetent TG1 E. coli cells (obtained from Lucigen®) were electroporated using a BTX® ECM® 630 electroporation system and the manufacturer's suggested parameters. For each library, four to six electroporation reactions with 0.5 μg of ligation product per reaction were performed. Immediately after each electroporation reaction, the cuvettes were washed with 2 mL of recovery media (obtained from Lucigen®) and the TG1 cells were recovered at 37° C. with shaking for 1 hour. Selective media, 2YT containing 100 μg/mL carbenicillin (2YTC) was added, and the TG1 cells were grown to an OD₆₀₀ of approximately 0.5. M13K07 helper phage were added at an MOI of approximately 10 and infected at 37° C. for 30 minutes without shaking, followed by 30 minutes with shaking, and then 50 μg/mL kanamycin was added. The cells were grown overnight at 30° C. with shaking. Cultures were harvested by centrifugation at 8,000 rpm at a temperature of 4° C. and the pellets were discarded. PEG/NaCl (obtained from Teknova) was added to the supernatants at a final concentration of 4% PEG. The phage were precipitated on ice for 1 hour, then spun at 8,000 rpm to pellet. The supernatants were removed, and the phage were dissolved in 40 mL PBS. The solutions were centrifuged at maximum speed for 10 minutes to remove any insoluble material, then phage were precipitated a second time from the supernatant by addition of PEG/NaCl and incubation on ice. The phage were again pelleted by centrifugation and suspended in 8 mL of PBS containing 15% glycerol, then aliquoted and frozen.

### Phage Panning

[0811] Phage aliquots (0.5 mL) were thawed and mixed with 0.5 mL of 10% BSA in PBS to block. The phage were added to an aliquot of 200 μL M280-streptavidin (M280SA) beads and incubated at room temperature with gentle rotation for 1 hour. Meanwhile, biotinylated r-Tau (r-Tau-biotin, 100 pmol) was added to a second aliquot of 200 μL M280SA beads and incubated at room temperature with gentle rotation for 30 minutes, then the beads were washed with PBS with 1% BSA (PBSA) three times, using a magnet to separate the beads between each wash. The phage solution was then separated from the negative M280SA beads using the magnet, and added to the r-Tau-loaded beads. After a 1 hour incubation with gentle rotation, the beads were washed four times with PBS containing 0.1% BSA and 0.05% Tween® 20, each wash lasting 5 minutes. Bound phage were eluted from the beads using 0.1 M glycine (pH 2.7) for 30 minutes; the eluted phage solution was then neutralized with 1 M Tris (pH 7.5). The eluted phage were used to infect 10 mL TG1 E. coli grown to mid-log phase (OD₆₀₀ approximately 0.5) at 37° C. for 30 minutes without shaking, followed by 30 minutes with shaking. Selective media (2YTC) was added (40 mL volume), and the cultures were grown for 1-2 hours at 37° C. with shaking. At this point the cultures were at OD₆₀₀ of 0.5 or lower, and were infected with M13K07 helper phage at an MOI of approximately 10. After infection, 50 μg/mL kanamycin was added and the cultures were grown overnight at 30° C. with shaking. For the second panning round, phage were precipitated once with PEG/NaCl and concentrated 20-fold, then the same protocol as above was followed, except that more stringent washing was performed (6×PBST washes, 2 for 10 minutes). After the second panning round, infected TG1 cells were spread onto 2YTCG plates (obtained from Teknova) for picking of single colonies for screening.

### Generating Fabs Via Periplasmic Expression

[0812] Single colonies from the second panning round output were picked and placed into 96-well deep-well plates containing 0.5 mL of 2YTC media. The plates were sealed and grown overnight at 37° C. with shaking. To induce periplasmic Fab expression, 50 μL of the overnight culture was transferred to new 96-well deep-well plates containing 950 μL per well of 2YTC media with auto-induction supplements (obtained from EMD Millipore). The plates were sealed and grown overnight at 37° C. The plates were centrifuged at 4,000 rpm for 10 minutes to pellet the bacteria and the media was discarded. The pellets were suspended in 0.1 mL of PPB buffer (obtained from Teknova) and shaken at 10° C. and 1,000 rpm for one hour, after which 0.3 mL of water was added to each well. After an additional 30 minutes of shaking, the plates were spun at maximum speed for 10 minutes. The resulting supernatant contained soluble, crude Fab for screening.

Screening Fabs for Binding to r-Tau and p-Tau

[0813] Half-area ELISA plates (Costar™) were coated overnight at 4° C. with 25 μL per well of 0.5 μg/mL r-Tau or p-Tau. The plates were washed three times with PBST using a BioTek® plate washer. The plates were then blocked for one hour at room temperature with 100 μL per well of PBSA. After washing three times with PBST, the periplasmically-expressed Fabs were added (25 L per well) and the plates were incubated for one hour. The plates were subsequently washed three times with PBST, and 25 μL per well of PBSA containing a 1:5,000 dilution of HRP-conjugated rabbit anti-human kappa (obtained from Bethyl Laboratories) was added. The plates were incubated at room temperature for 30 minutes, then washed three times with PBST. The plates were developed by adding 25 μL per well of TMB substrate (obtained from Thermo Fisher) and quenched with 2N H₂SO₄. The signal was quantified on a BioTek® plate reader at A₄₅₀. Wells with signal greater than 5-fold over background for both r-Tau and p-Tau were considered positive and the clones were re-arrayed from the primary culture for confirmation of binding (by repeat of ELISA) and sequencing of the variable regions.

### Screening Fabs for Isoform and Species Specificity

[0814] ELISAs were performed essentially as described above, but coating was performed using 1 μg/mL of each recombinant Tau species and using a 1:1 dilution (in PBS with 0.1% BSA, 0.05% Tween®) of Fab containing supernatant. The results of the ELISAs, showing Fab binding to cyno Tau and mouse Tau, as well as binding to phosphorylated full-length human Tau and the human Tau isoforms, are shown in Table 1 below.

TABLE 1
Fab screening of human Tau isoforms and species specificity

| | 0N3R | | 0N4R | | 1N3R | | 1N4R | | 2N3R | | 2N4R | |
|---|---|---|---|---|---|---|---|---|---|---|---|---|
| | A₄₅₀ | avg. | A₄₅₀ | avg. | A₄₅₀ | avg. | A₄₅₀ | avg. | A₄₅₀ | avg. | A₄₅₀ | avg. |
| 1A1 | 1.658 | 1.539 | 2.390 | 2.368 | 2.571 | 2.586 | 2.468 | 2.390 | 2.590 | 2.520 | 2.583 | 2.502 |
| | 1.420 | | 2.347 | | 2.600 | | 2.312 | | 2.450 | | 2.421 | |
| 1C7 | 2.472 | 2.403 | 2.660 | 2.658 | 2.704 | 2.696 | 2.731 | 2.688 | 2.775 | 2.747 | 2.735 | 2.734 |
| | 2.334 | | 2.657 | | 2.688 | | 2.645 | | 2.719 | | 2.734 | |
| 1A5 | 1.266 | 1.191 | 2.461 | 2.482 | 2.622 | 2.582 | 2.302 | 2.328 | 2.580 | 2.541 | 2.570 | 2.570 |
| | 1.115 | | 2.504 | | 2.541 | | 2.353 | | 2.503 | | 2.569 | |
| 1D10 | 0.331 | 0.323 | 1.211 | 1.186 | 1.505 | 1.486 | 0.967 | 0.939 | 1.467 | 1.462 | 1.541 | 1.472 |
| | 0.316 | | 1.162 | | 1.467 | | 0.911 | | 1.457 | | 1.403 | |
| 1G7 | 0.746 | 0.725 | 2.123 | 1.877 | 2.220 | 2.159 | 1.840 | 1.799 | 2.056 | 2.002 | 2.126 | 2.044 |
| | 0.705 | | 1.632 | | 2.098 | | 1.757 | | 1.948 | | 1.962 | |

| | 1-421 | | 50-441 | | p-Tau | | | | | |
|---|---|---|---|---|---|---|---|---|---|---|
| | (2N4R) | | (2N4R) | | (2N4R) | | cyno Tau | | mouse Tau | |
| | A₄₅₀ | avg. | A₄₅₀ | avg. | A₄₅₀ | avg. | A₄₅₀ | avg. | A₄₅₀ | avg. |
| 1A1 | 1.485 | 1.524 | 1.683 | 1.796 | 2.120 | 2.094 | 1.729 | 1.807 | 1.832 | 1.953 |
| | 1.563 | | 1.910 | | 2.067 | | 1.886 | | 2.074 | |
| 1C7 | 2.033 | 2.121 | 2.041 | 2.303 | 2.142 | 2.238 | 2.246 | 2.311 | 0.060 | 0.060 |
| | 2.210 | | 2.565 | | 2.334 | | 2.376 | | 0.060 | |
| 1A5 | 1.491 | 1.638 | 1.898 | 2.083 | 1.953 | 2.080 | 1.766 | 1.898 | 1.961 | 2.069 |
| | 1.786 | | 2.267 | | 2.207 | | 2.030 | | 2.176 | |
| 1D10 | 0.738 | 0.806 | 1.053 | 1.128 | 1.111 | 1.191 | 0.862 | 0.867 | 1.022 | 1.099 |
| | 0.875 | | 1.204 | | 1.270 | | 0.872 | | 1.175 | |
| 1G7 | 1.121 | 1.227 | 1.594 | 1.679 | 1.411 | 1.610 | 1.412 | 1.526 | 1.415 | 1.508 |
| | 1.332 | | 1.764 | | 1.809 | | 1.641 | | 1.601 | |

### Antibody Generation

[0815] AntiTau antibodies were expressed as mouse-human chimeric antibodies by HEK293 cell transient transfection. IgGs were purified with protein A affinity chromatography.

[0816] FIG. 3 through FIG. 7 depict sequence alignments for antibody clones 1C7, 1A1, 1A5, 1D10, and 1G7 aligned against human light chain (immunoglobulin kappa variable 4 (IGKV4) or immunoglobulin kappa variable 2 (IGKV2)) and heavy chain (immunoglobulin heavy variable 3 (IGHV3) or immunoglobulin heavy variable 1 (IGHV1)) sequences. For the alignments, CDR definitions were defined by their sequence hypervariability.

### Chimeric IgG ELISA

[0817] Nunc® MaxiSorp® microtiter plates were coated with 1 μg/ml of recombinant Tau, p-Tau, or Tau isoforms. The plates were washed three times with PBST using a BioTek® plate washer and blocked with 200 μL per well of PBSA for 1 hour at room temperature. Serial 4-fold dilutions of each chimeric IgG antibody were incubated in each well for 1 hour at room temperature. The plates were subsequently washed three times with PBST, and 60 μL per well of PBSA containing a 1:1,000 dilution of HRP-conjugated goat anti-human IgG Fc secondary antibody was added. The plates were incubated at room temperature for 30 minutes, then washed three times with PBST. The plates were developed by adding 60 μL per well of TMB substrate (obtained from Thermo Fisher) and quenched with the 650 nm ELISA stop solution. The signal was quantified using a BioTek® plate reader at A650 and binding curves were plotted with PRISM software.

[0818] FIG. 8 depicts the results of ELISAs in which four chimeric IgG clones (clones 1A5, 1C7, 1G7, and 1D10) were tested for binding to full-length human Tau (Tau441 (2N4R)), hyperphosphorylated Tau441 (p-Tau), and the other five splice isoforms of human Tau (Tau352 (0N3R), Tau381 (1N3R), Tau410 (2N3R), Tau383 (0N4R), and Tau412 (1N4R)). As shown in FIG. 8, all of the clones bound to both unphosphorylated full-length Tau and p-Tau. In addition, all clones bound to the remaining splice isoforms 0N3R, 1N3R, 2N3R, 0N4R, and 1N4R.

[0819] The chimeric IgG clones 1A5, 1C7, 1G7, and 1D10 were also tested for cross-species reactivity to mouse Tau (SEQ ID NO:6) and cyno Tau (SEQ ID NO:7) in an ELISA assay. All four clones exhibited comparable binding to cyno Tau as to human full-length Tau. The 1A5, 1G7, and 1D10 clones also exhibited binding to mouse Tau. The four chimeric IgG clones were also tested for binding to C-terminal truncated human Tau (Tau(1-421); SEQ ID NO:4) and N-terminal truncated human Tau (Tau(50-441); SEQ ID NO:5). It was found that all of the tested clones bound to Tau within amino acid residues 50-421 of SEQ ID NO: 1.

### Epitope Binning for Selected Antibodies

[0820] Epitope binning assays were performed using a FortéBio® Octet® RED384 instrument using FortéBio® Streptavidin biosensors. Biotinylated recombinant Tau was diluted to a concentration of 2 μg/mL in kinetic buffer (obtained from FortéBio®) and captured onto individual biosensors for 1 minute. A baseline was then established for 1 minute in kinetic buffer. The loaded biosensors were dipped into 10 μg/mL of the first chimeric IgG antibody until signal saturation, followed by dipping into 1 μg/mL of a second antibody. The binding for the second antibody was normalized to its total binding in the absence of the first antibody.

[0821] Results of the binning assays are summarized below in Table 2, which shows that clones 1A5, 1G7, and 1D10 binned together, while clone 1C7 belonged to a separate bin.

TABLE 2
Epitope binning of chimeric IgG clones

| | 1C7 | 1A5 | 1G7 | 1D10 |
|---|---|---|---|---|
| 1C7 | 0.03 | 0.88 | 0.84 | 0.82 |
| 1A5 | 0.70 | −0.13 | −0.10 | −0.35 |
| 1G7 | 0.85 | −0.04 | −0.03 | −0.12 |
| 1D10 | 0.88 | −0.07 | 0.12 | −0.05 |
| Ab107 | 1.00 | 1.00 | 1.00 | 1.00 |

### Biacore Assessment of Selected Anti-Tau Antibodies

[0822] The affinity of chimeric IgG antibodies 1C7, 1A1, 1A5, 1D10, and 1G7 for recombinant Tau was determined by surface plasmon resonance using a Biacore™ T200 instrument. Biacore™ Series S CM5 sensor chips were immobilized with monoclonal mouse anti-human IgG (Fc) antibody (human antibody capture kit from GE Healthcare). 1 μg/mL of antibody was captured for 1 minute on each flow cell and serial 3-fold dilutions of recombinant Tau were injected at a flow rate of 30 L/min. Each sample was analyzed with a 3-minute association and a 10-minute dissociation. After each injection the chip was regenerated using 3M MgCl₂. Binding response was corrected by subtracting the RU from a flow cell capturing an irrelevant IgG at similar density. A 1:1 Languir model of simultaneous fitting of kₒₙ and k_{off} was used for kinetics analysis.

[0823] As shown in FIGS. 9A through 9E, clones 1C7, 1A1, 1A5, 1D10, and 1G7 all exhibited fast on-rates and very slow off-rates, consistent with strong affinity for recombinant Tau.

[0824] Table 3 below shows binding properties of clones 1C7, 1A5, 1G7, 1A1, and 1D10, including their sub-nanomolar affinity for recombinant human Tau as measured by Biacore, their binding specificity for cyno and mouse Tau, and the epitope or epitopes recognized by each antibody.

TABLE 3
Binding properties of antibody clones

| | Binding to | Binding to | Affinity | Epitope(s) |
|---|---|---|---|---|
| | Cyno Tau | Mouse Tau | for r- | Recognized |
| Clone | (yes/no) | (yes/no) | Tau (nM) | by Antibody |
| 1C7 | Y | N | 0.20 | 111-125 |
| 1A5 | Y | Y | 0.20 | 256-270 and 346-360 |
| 1G7 | Y | Y | 0.10 | 256-270 and 346-360 |
| 1A1 | Y | Y | 0.02 | 256-270 and 346-360 |
| 1D10 | Y | Y | 0.20 | 256-270 and 346-360 |

### Epitope Mapping Using Peptide Microarrays

[0825] Full length human Tau (encoded by the microtubule-associated protein Tau isoform 2 gene (MAPT), amino acid sequence NCBI Reference Sequence No. NP_005901.2, SEQ ID NO: 1, variant designation “2N4R”) was divided into 15 amino acid peptides, offset by 5 amino acids (overlapping by 10 amino acids). Peptides were synthesized and covalently attached to silica slides in triplicate with a spot size of 0.5 mm (obtained from JPT Technologies, Berlin, Germany). Chimeric IgG antibodies were diluted to a concentration of 5 μg/mL in 3% bovine serum albumin in Tris-buffered saline (10 mM Tris, pH 7.5, 150 mM NaCl) supplemented with 0.05% Tween®20 (3% BSA-TBST). Diluted antibodies were allowed to bind to peptides printed onto slides for 2 hours at room temperature as described in the PepStar™ user manual (JPT Technologies). Following extensive washing (5×5 minutes with TBST), slides were incubated with secondary antibodies goat anti-human IgG, Alexa Fluor 568 conjugate, 1 μg/mL in 3% BSA-TBST) for 1 hour at room temperature. After extensive washing, (5×5 minutes with TBST, then 5×5 minutes with ultrapure water), slides were dried overnight and imaged using an Opera Phenix™ system in the 568 nm channel. Images were aligned to peptide array definition files using Galviewer software obtained from JPT Technologies and ImageJ software with control human IgG serving as landmarks.

[0826] The results of the epitope mapping are shown in FIG. 10 and Table 12 below. FIG. 10A depicts that clone 1C7 binds to a peptide corresponding to residues 111-125 of SEQ ID NO:1, indicating that residues 111-125 are sufficient for the antibody to bind to Tau. FIG. 10B shows that 1A1 binds to peptides corresponding to residues 251-265 and residues 256-270 of SEQ ID NO:1, with the strongest binding occurring within residues 256-270, indicating that residues 251-265 or residues 256-270 are sufficient for the antibody to bind to Tau. FIG. 10B also shows that 1A1 binds to a peptide corresponding to residues 346-360 of SEQ ID NO: 1, indicating that residues 346-360 are sufficient for the antibody to bind to Tau. Clones 1A5, 1G7, and 1D10 showed identical peptide binding profiles as clone 1A1.

### Epitope Confirmation and Phosphorylation Study

[0827] Peptides corresponding to original binding sites on the microarray were synthesized and included all permutations of phospho-serine epitopes. Peptides were synthesized with a biotinylated N-terminus and C-terminal amide. Peptides were purified and confirmed by mass spectrometry. Peptides were then bound to streptavidin-coated plates in half serial dilutions from 250 ng/well of each peptide. Antibody binding was tested at 1 μg/mL in 5% BSA TBST, followed by washing and detection with goat anti-human HRP (as described above in the “Chimeric IgG ELISA” section).

[0828] FIG. 11 shows the results of an epitope confirmation and phosphorylation study for clones 1A1, 1A5, 1D10, and 1G7. For the epitope 251-270, antibody binding was measured for an unphosphorylated PDLKNVKSKIGSTENLKHQP (SEQ ID NO:36) peptide, a PDLKNVKSKIGSTENLKHQP (SEQ ID NO:36) peptide phosphorylated at either Ser258 or Ser262, or a PDLKNVKSKIGSTENLKHQP (SEQ ID NO:36) peptide phosphorylated at both Ser258 and Ser262. See, FIG. 11, top panel. All of the 1A1, 1A5, 1D10, and 1G7 antibodies exhibited strong binding to both the unphosphorylated peptide, confirming that these antibodies recognize the 251-270 epitope. Additionally, all of the 1A1, 1A5, 1D10, and 1G7 antibodies exhibited strong binding to at least one monophosphorylated peptide. 1A1 also exhibited strong binding to the peptide that was phosphorylated at both Ser258 and Ser262.

[0829] For the epitope 346-360, antibody binding was measured for an unphosphorylated FKDRVQSKIGSLDNI (SEQ ID NO:38) peptide, a FKDRVQSKIGSLDNI (SEQ ID NO:38) peptide phosphorylated at either Ser352 or Ser356, or a FKDRVQSKIGSLDNI (SEQ ID NO:38) peptide phosphorylated at both Ser352 and Ser356. See, FIG. 11, bottom panel. All of the 1A1, 1A5, 1D10, and 1G7 antibodies exhibited strong binding to both the unphosphorylated peptide, confirming that these antibodies recognize the 346-360 epitope. Additionally, the 1A1 antibody exhibited strong binding to each of the monophosphorylated peptides, while the 1G7 antibody exhibited strong binding to one of the monophosphorylated peptides (pSer352).

### Example 2. Functional Characterization of Anti-Tau Antibodies

[0830] This example illustrates that anti-Tau antibodies as described herein are able to bind to soluble Tau in both control and Alzheimer's disease brain lysate samples, and that the antibodies inhibit Tau seeding by human brain lysate.

### Human Brain Lysate Binding

[0831] Control and Alzheimer's disease brain samples were obtained from Banner Health®. Samples were sectioned and one approximately 30 mg section was homogenized in five volumes (w/v) of cold PBS (with protease and phosphatase inhibitors) using a 3 mm bead in a 2 mL tube and a tissue lyzer (3 minutes at 25/s×2). The resulting lysate was then centrifuged at 3,000×g for 10 minutes at 4° C. and the supernatant was collected as the soluble fraction. Pierce™ BCA protein assays and human Tau ELISAs (obtained from Life Technologies) were performed according to the manufacturers' protocols to determine total protein and total Tau levels, respectively.

[0832] ELISAs were performed using chimeric IgG antibodies 1C7 and 1A1 as described in Example 1 above, except with a coating of 50 μL of soluble brain lysate containing 100 ng/mL of total Tau protein diluted in PBS (with protease and phosphatase inhibitors) overnight at 4° C. As shown in Table 4 below, antibody clones 1C7 and 1A1 were able to bind soluble Tau in lysate samples obtained from control and Alzheimer's disease brain tissue at both concentrations of antibody that were tested (0.5 and 5 nM). An anti-RSV antibody was used a negative control.

TABLE 4
Binding to soluble Tau in control and Alzheimer's disease samples

| | nM | Control | | | AD | | |
|---|---|---|---|---|---|---|---|
| Control | 0.5 | 0.147 | 0.106 | 0.108 | 0.108 | 0.117 | 0.115 |
| | 5 | 0.151 | 0.107 | 0.110 | 0.108 | 0.107 | 0.117 |
| 1C7 | 0.5 | 2.724 | 2.565 | 2.614 | 2.602 | 2.450 | 2.568 |
| | 5 | 2.708 | 2.682 | 2.696 | 2.696 | 2.579 | 2.728 |
| 1A1 | 0.5 | 2.208 | 1.687 | 1.772 | 1.769 | 1.695 | 1.738 |
| | 5 | 2.734 | 2.576 | 2.567 | 2.513 | 2.535 | 2.697 |

### Tau Seeding Assay

[0833] The ability of chimeric IgG antibodies 1A1 and 1C7 to inhibit Tau seeding by human brain lysate was performed as described below. A brief overview of the experimental design is shown in FIG. 12A.

[0834] FRET sensor cells (Tau RD P301S FRET Biosensor, Catalog: CRL-3275™, obtained from ATCC®) were plated on poly-D-lysine (PDL)-coated 96-well plates (Corning® BioCoat™ Poly-D-Lysine Mutiwell Plates, Catalog: 356640, obtained from Thermo Fisher Scientific™) at a density of 30,000 per well in 100 μL per well DMEM (DMEM High Glucose (Catalog: 11-965-092) supplemented with 10% HI-FBS (Catalog: 10082-147), 1×MEM Non-Essential Amino Acids Solution (Catalog: 11-140-050), 1 mM Sodium Pyruvate (Catalog: 11-360-070), and 1× Penicillin-Streptomycin-Glutamine (Catalog: 10-378-016) (all obtained from Thermo Fisher Scientific™), and maintained at 37° C. with 5% CO₂ concentration. 4-5 hours after plating cells, protein seed containing hTau and anti-Tau antibodies were co-transfected using Lipofectamine®2000. For each well, PBS-soluble fraction from Alzheimer's disease (AD) patient brain tissue or age-matched healthy control brain tissue (obtained from Banner Health® and prepared using the same protocol as described above as for ELISAs) containing 1 μg total protein (about 0.2 ng Tau protein), and anti-Tau or control anti-RSV antibody (2 μg) were diluted in 25 μl Opti-MEM™ (Catalog: 31-985-088, obtained from Thermo Fisher Scientific™) and incubated at 37° C. for 20 minutes. 25 μL Opti-MEM™ containing 0.5 μl Lipofecatmine® 2000 (Catalog: 11-668-019, obtained from Thermo Fisher Scientific™) was then added to the protein-antibody mixture and further incubated at room temperature for 10 minutes. DMEM of FRET sensor cells were then entirely replaced with the transfection mixture (50 μL Opti-MEM™ containing protein seed (1 μg total protein), antibodies (2 μg), and Lipofectamine® 2000 (0.5 μl) per well), and FRET sensor cells were kept at 37° C. with 5% CO₂ concentration for 24 hours. FRET sensor cells transfected with protein seeds with or without antibodies were then fixed in 1×PBS (Catalog: P0191, Teknova) containing 4% PFA (Catalog: 15714-S, Electron Microscopy Sciences) and 4% sucrose (Catalog: S5-3, obtained from Thermo Fisher Scientific™) for 15 minutes at room temperature, followed by 4× wash with 1×PBS.

[0835] For FRET quantification, fixed FRET sensor cells (typically about 10,000 cells per well) were imaged using an Opera Phenix High™ Content Screening System (obtained from PerkinElmer®) and images were quantified using the Harmony® software (obtained from PerkinElmer®). To acquire FRET images, a built-in CFP/YFP FRET acquisition protocol (excitation at 425 nm, donor emission at 435-480 nm, and acceptor emission at 500-550 nm) and a water-immersion 20× objective (NA=1.0) under the non-confocal mode was used. FRET intensity was defined as the ratio of acceptor fluorescence to donor fluorescence (FRET=acceptor/donor) per pixel. Mean FRET intensity was then calculated for each cell and a histogram showing the distribution of the mean FRET intensity (per cell) was generated for each condition (e.g., cells transfected with AD patient brain tissue lysate without antibody). The threshold to determine FRET positive cells was set around the highest mean FRET values of FRET sensor cells that were transfected with healthy control brain tissue lysate without antibodies (typical mean FRET intensity was greater than 2.5 or 2.6). The FRET signals of FRET-positive cells were integrated (iFRET: integrated FRET) and normalized by integrated FRET intensity of all the cells for each well.

[0836] As shown in FIG. 12B, pre-incubation of anti-Tau antibody clones 1A1 and 1C7 with brain lysate inhibited the seeding and aggregation of Tau.

### Pharmacokinetic Studies

[0837] Wild-type 6-8 week old male C57B16 mice (n=3/group) were intravenously dosed with 10 mg/kg of antibody (1A1 or 1C7). In-life bleeds were taken at 30 min, 1 day, 4 days, and 7 days post-dose via submandibular bleeds. Blood was collected in EDTA plasma tubes and spun at 14,000 rpm for 5 min. Plasma was then isolated for subsequent pharmacokinetic analysis.

[0838] Antibody concentrations were quantified using a generic human IgG assay (MSD human IgG kit # K150JLD-4) following the manufacturer's protocol. Briefly, plates were blocked for 30 min with MSD Blocker A and diluted plasma samples (1:2500) were added in duplicate to the blocked plates using a Hamilton Nimbus liquid handler. Dosing solutions were also analyzed on the same plate to confirm the correct dosage. The standard curve, 0.78-200 ng/mL IgG, was fit using a four-parameter logistic regression. As shown in FIG. 13 and in Table 5 below, 1A1 and 1C7 exhibited in vivo pharmacokinetic properties within the expected range for an IgG and did not show any off-target clearance.

TABLE 5

| Antibody | Dose (mg/kg) | Mouse | CL (mL/day/kg) | t_{1/2} (days) |
|---|---|---|---|---|
| anti-RSV | 10 | WT | 7.62 | 8.06 |
| anti-Tau^{1A1} | 10 | WT | 3.13 | 16.7 |
| anti-Tau^{1C7} | 10 | WT | 4.59 | 9.33 |

[0839] Further, plasma pharmacokinetic properties of additonal anti-Tau clones were also measured following the same experimetal protocol as described above, except that in-life bleeds were taken at 1 hour, 1 day, 4 days, and 7 days (Table 6 and FIGS. 26A and 26B).

TABLE 6

| | | Dose | Time point | | | |
|---|---|---|---|---|---|---|
| Antibody | Isotype | (mg/kg) | (hr) | n/grp | Age | Sex |
| anti-RSV | hIgG1 | 10 | 1 h, 1 d, 4 d, | 3 | 14 w | F |
| | LALAPG | | 7 d | | | |
| Clone with light chain of SEQ ID NO: 604 | hIgG1 | 10 | 1 h, 1 d, 4 d, | 3 | 14 w | F |
| and heavy chain of SEQ ID NO: 602 | | | 7 d | | | |
| Clone with light chain of SEQ ID NO: 616 | hIgG1 | 10 | 1 h, 1 d, 4 d, | 3 | 14 w | F |
| and heavy chain of SEQ ID NO: 602 | | | 7 d | | | |
| Clone with light chain of SEQ ID NO: 463 | hIgG1 | 10 | 1 h, 1 d, 4 d, | 3 | 14 w | F |
| and heavy chain of SEQ ID NO: 602 | | | 7 d | | | |
| Clone with light chain of SEQ ID NO: 463 | hIgG1 | 10 | 1 h, 1 d, 4 d, | 3 | 14 w | F |
| and heavy chain of SEQ ID NO: 603 | | | 7 d | | | |
| ch17G2.A1 | hIgG1 | 10 | 1 h, 1 d, 4 d, | 3 | 14 w | F |
| | | | 7 d | | | |

### Example 3. Refined Epitope Mapping of Chimeric IgG Antibody 1C7

[0840] This example describes refined epitope mapping of antibody 1C7 that reveals residues L114 and E115 as key residues in the epitope.

### Refined Epitope Mapping

[0841] Full-length wild-type Tau and variants with single alanine mutations were genetically fused to the C-terminal truncated phage coat protein P3 and displayed on phage particles. To perform phage ELISA, 60 μL of 1 μg/mL anti-Tau antibodies in PBS was coated on maxi-sorp 96-well plate at 4° C. overnight. Next day, the plate was washed with PBST and blocked with ELISA buffer (PBS with 0.5% BSA) at room temperature for 1 hour. Freshly prepared phage particles were diluted in ELISA buffer and incubated on plate for 1 hour at room temperature. The plate was washed and then HRP conjugated anti-M13 Monoclonal Conjugate (GE 27942101) was added for another hour at room temperature. After extensive washing, the plate was developed with 60 μL/well of TMB one component substrate and the development was stopped with 60 μL/well of the 650 nm stop solution when the color is sufficiently developed (typically 1-5 minutes). Percentage of binding to each truncated Tau form was calculated as the ratio of binding signal to the signal from full-length Tau.

[0842] The results of the refined epitope mapping are shown in FIGS. 14A and 14B. Alanine mutations at L114 and E115 of the full-length wild-type Tau (SEQ ID NO:1) abolished binding of antibody 1C7 to the respective mutated Tau (boxed graphs in FIG. 14A). L114A and E115A mutations did not affect protein expression as indicated by the myc tag binding.

### Example 4. In Vivo Dosing Studies of Chimeric IgG Clones 1C7 and 1A1 in Mice

[0843] This example describes antibody dosing studies in mice.

### Immunization of Mice

[0844] Mice overexpressing human Tau from PS19 line were used to evaluate target engagement of chimeric IgG clones 1C7 and 1A1. This transgenic model harbors the T34 isoform of microtubule-associated protein Tau with one N-terminal insert and four microtubule binding repeats (1N4R) encoding the human P301S mutation, all driven by the mouse prion protein promoter. Female or male hemizygous mice (2-4-month-old) were obtained from Jackson Laboratory. They were injected i.v. (at 35 mg/kg) or i.p. (at 50 mg/kg) with a control IgG, chimeric IgG clone 1C7, or chimeric IgG clone 1A1. In-life blood was collected through the submandibular vein. At 2 or 7 days post-injection, mice were deeply anesthetized with Avertin and blood was collected via intracardiac puncture and processed to separate plasma by centrifugation at 13,000 RPM for 10 minutes. In addition, cerebral spinal fluid (CSF) was collected via the cisterna magna and visually inspected for potential blood contamination. Following transcardial perfusion with ice-cold PBS, brain tissue was removed and snap frozen.

### Preparation of Brain (e.g., Hippocampus) Fractions

[0845] A soluble protein extract from the brain tissue was prepared following a previously published method with slight modification. Briefly, brain tissue (or sub-dissected hippocampus) was weighed and homogenized in 9 volumes of high-salt buffer (Reassembly (RAB) buffer supplemented with protease and phosphatase inhibitors) using the Qiagen TissueLyser. Homogenized lysates were spun at 100,000×g for 30 minutes, and the supernatant was saved as the “soluble fraction”. Pellets were further homogenized in RIPA buffer for analysis of detergent soluble fractions. Total protein content was measured using BCA assay (Pierce).

### ELISA Measurements of Antibodies Bound to Tau

### Total Tau

[0846] Total human Tau from PS19 mouse brain, plasma, and CSF was measured using a commercial MSD kit for human Tau as per manufacturer's protocol, or an in-house developed ELISA using mouse monoclonal antibody HT7 to capture Tau, and biotinylated BT2 antibody as the detection antibody. Briefly, 2 μg/mL of PBS diluted HT7 was coated on 384-well ELISA plates overnight at 4° C. Next day, plates were washed with TBS-T and 2 μg/mL brain lysate, diluted plasma, or diluted CSF was added to the plates and the plates were incubated overnight at 4° C. Next day, plates were washed and detection antibody biotinylated-BT2 was added at 0.5 μg/mL for 15 minutes. Streptavidin HRP was used at 1:10000-1:20000 for detection.

### Bound Tau

[0847] Tau bound to therapeutic chimeric IgG clones 1C7 and 1A1 was measured using a modified version of the protocol above. Briefly, plates were coated and samples were added as described above. After sample incubation, plates were washed and anti-human HRP was added at 1:5000 to detect antibody-bound Tau. A positive signal would be possible by the presence of human IgG bound to Tau in the brain lysate, plasma, or CSF.

### Free Tau

[0848] Free Tau was measured using a modified version of the total Tau assay described above. Briefly, plates were coated and samples were added as described above. For measuring free Tau, a biotinyated version of the therapeutic antibody was generated and used as the detection antibody. Since the binding site of the biotinylated antibody is the same as the therapeutic antibody, only free Tau will give a positive signal since the binding site of Tau bound to therapeutic antibody would already be occluded. Streptavidin HRP was used as the secondary antibody. Standard curves for each antibody pair were generated to interpolate Tau values. All values are reported in nM and brain Tau is normalized to total brain protein.

[0849] FIGS. 15A-15D depict the results of 7-day target engagement study of chimeric IgG clones 1C7 and 1A1 in PS19 Tau transgenic mice. FIG. 15A outlines the plasma studies. After injection, plasma samples were collected at baseline, 2 days (2d), 4 days (4d), and 7 days (7d) post-dose. FIG. 15B illustrates that chimeric IgG clones 1C7 and 1A1 both have expected PK in plasma compared to negative control or benchmark anti-Tau clones (Ab306 or Ab017). FIG. 15C illustrates that plasma total Tau levels increased after 2 days and remained high for at least 7 days post-dose. FIG. 15D illustrates that plasma bound Tau levels also increased post-dose and this effect was sustained well in the 1C7 clone.

[0850] FIGS. 16A-16G depict the results of 2-day target engagement study of chimeric IgG clone 1C7 in PS19 Tau transgenic mice. FIG. 16A outlines the plasma and brain studies. Plasma samples were collected at baseline and terminal CSF was collected at 2 days (2d) post-dose. FIGS. 16B-16D illustrates that chimeric IgG clone 1C7 has expected PK in plasma and brain compared to negative control or benchmark anti-Tau antibody Ab017. FIGS. 16E and 16F illustrate that both chimeric IgG clone 1C7 and the benchmark anti-Tau antibody Ab017 significantly increased the plasma total (FIG. 16E) and bound (FIG. 16F) Tau levels at 2 days post-dose. FIG. 16G illustrates that chimeric IgG clone 1C7 also bound to Tau in the CNS as indicated by the observed increase in bound Tau in the CSF at 2 days post-dose.

### AD Patient Cerebral Spinal Fluid (CSF) Immunoprecipitation

[0851] Patient CSF was purchased from PrecisionMed. Protein A beads (SureBeads; Bio-Rad) were blocked in 2% BSA for 1 hour at 24° C. and then washed three times in TBST. Both Tween®20 (0.02%) and EDTA-free complete protease inhibitors (Roche) were added to the CSF prior to incubation with antibodies. CSF (50 μL) was incubated for 1 hour at 4° C. with 2 μg of antibody. The CSF/antibody mixture was then added to 100 μL of blocked/washed beads and incubated for 18 hours at 4° C. The unbound fraction was collected and the beads were washed three times with 1 mL of wash buffer (50 mM Tris pH7, 100 mM NaCl, 0.5% TritonX-100) followed by one wash with 1 mL PBS. The bound fraction was then eluted by incubation with 45 μL elution buffer (Pierce) for 10 minutes and neutralized by addition of 5 μL Tris buffer (pH 8.8).

[0852] As shown in FIG. 17, the unbound (▴) and bound (•) Tau was measured by ELISA and each dot represents a unique patient (n=3) and the line indicates the mean of these values. The dotted line represents the lower limit of quantification (LLOQ) of the ELISA assay. Though chimeric IgG clone 1C7 and the benchmark anti-Tau antibody Ab017 were able to pulldown Tau from Alzheimer's disease (AD) patient CSF, anti-Tau 1A1 was not, indicating the epitope for antibody 1A1 is either not present or inaccessible in CSF Tau.

### Example 5. Humanized Murine Antibody and Affinity Matured Antibody Discovery and Screening of Murine Anti-Tau Antibody 1C7

[0853] This example illustrates the design, generation, and characterization of humanized and affinity matured antibodies of murine anti-Tau antibody 1C7.

### Materials and Methods

[0854] Residue numbers are according to Kabat (Kabat et al., Sequences of Proteins of Immunological Interest, 5th Ed., Public Health Service, National Institutes of Health, Bethesda, Md. (1991)).

Direct Hypervariable Region Grafts onto the Acceptor Human Consensus Framework

[0855] Variants constructed during the humanization of murine anti-Tau antibody 1C7 (mu1C7) were assessed in the form of an IgG. The VL and VH regions from mulC7 were aligned with the human VL kappa IV (VL_{KIV}) and human VH subgroup III (VH_{III}) consensus sequences. Hypervariable regions (HVR) from the mulC7 were engineered into VL_{KIV} and VH_{III} acceptor frameworks to generate CDR-graft variants. From the mulC7 VL region, positions 24-34 (L1), 50-56 (L2), and 89-97 (L3) were grafted into VL_{KIV}. From the mulC7 VH region, positions 26-35 (H1), 50-65 (H2), and 93-102 (H3) were grafted into VH_{III} (FIG. 3). The HVR definitions are defined by their sequence hypervariability (Wu and Kabat, J. Exp. Med. 132:211-250, 1970), their structural location (Chothia and Lesk, J. Mol. Biol. 196:901-917, 1987), and their involvement in antigen-antibody contacts (MacCallum et al., J. Mol. Biol. 262: 732-745, 1996). To evaluate framework Vernier positions that might be important, selected Vernier positions were mutated back to the murine sequence. The Vernier positions include S49 and S75 in VH. Four different versions of VH sequences were synthesized (gblocks from Integrated DNA Technologies (IDT)) and cloned into mammalian expression vectors. Four different humanized graft variants (v1, v2, v3, and v4) were generated and evaluated by surface plasmon resonance (SPR) analysis.

### Affinity Maturation

[0856] The phagemid used for this work is a monovalent Fab-g3 display vector consisting of 2 open reading frames under control of a single Lac promoter. The first open reading frame consists of the OmpA signal sequence fused to the VL and CL domains of the acceptor light chain and the second open reading frame consists of the PelB signal sequence fused to the VH and CH1 domains of the acceptor heavy chain followed by the C-terminal truncated phage coat protein P3. The CDR-graft variant (hulC7.v2) was generated as the Fab displayed on phage.

[0857] To improve affinity, a total of thirteen phage libraries containing changes in hypervariable regions were generated (see, Table 7). Sequence diversity was introduced at the selected randomization regions using Kunkel mutagenesis. For NNK randomized libraries, positions in the hypervariable region were each fully randomized one at a time to all possible 20 amino acids using oligonucleotides encoding NNK. Oligos for positions located in the same hypervariable region were pooled and one library for each CDR loop was generated. For soft randomized libraries, positions in the hypervariable region were kept at 50% mutation rate by using oligonucleotides with a mixture containing 70% of the base found in the wild-type sequence and 10% each of the other three bases at each position. This allows multiple residues in the targeted region to be simultaneously randomized.

TABLE 7

| Libraries | Randomization regions |
|---|---|
| 1 | L1.NNK |
| 2 | L2.NNK |
| 3 | L3.NNK |
| 4 | H1.NNK |
| 5 | H2.NNK |
| 6 | H3.NNK |
| 7 | L1.soft |
| 8 | L2.soft |
| 9 | L3.soft |
| 10 | H1.soft |
| 11 | H2.soft |
| 12 | H3.soft |
| 13 | L3.soft_H3.soft |

### Generation of Phage Libraries

[0858] Oligonucleotides designed to introduce diversity into each hypervariable region were phosphorylated separately in 20-μL reactions containing 660 ng of oligonucleotide, 50 mM Tris pH 7.5, 10 mM MgCl₂, 1 mM ATP, 20 mM DTT, and 5 U polynucleotide kinase for 1 hour at 37° C. From the phosphorylated oligonucleotide reactions, 2 μL was added to 500 ng Kunkel template in 50 mM Tris pH 7.5, 10 mM MgCl₂ in a final volume of 25 μL. The mixture was annealed at 90° C. for 1 minute, 50° C. for 3 minutes and then cooled on ice. The annealed template was then filled in by adding 0.5 μL 10 mM ATP, 0.5 μL 10 mM dNTPs (10 mM each of dATP, dCTP, dGTP, and dTTP), 1 μL 100 mM DTT, 1 μL 10×TM buffer (0.5 M Tris pH 7.5, 0.1 M MgCl₂), 80 U T4 ligase, and 4 U T7 polymerase in a total volume of 30 μL for 2 hours at room temperature. These filled-in and ligated products were then each transformed into XL1-blue cells. The libraries were recovered in 10 mL SOC media for 1 hour at 37° C. Carbenacillin (50 μg/mL) and M13/KO7 helper phage (MOI 10) were added. The cultures were incubated for another 30 minutes at 37° C., transferred to 500 mL 2YT containing 50 μg/mL carbenacillin and 50 μg/mL kanamycin, and grown overnight at 30° C.

### Phage Selections

[0859] Recombinant Tau (r-Tau) was biotinylated through free amines using Sulfo-NHS-LC-Biotin (Thermo Scientific). For biotinylation reactions, a 3-fold molar excess of biotin reagent was used in PBS. Reactions were followed by extensive dialysis in PBS.

[0860] Phage was harvested from the cell culture supernatant and suspended in PBS containing 1% BSA. The phage libraries were incubated with biotinylated Tau at room temperature and the phage bound to biotin-r-Tau was then captured for 5 minutes on Dynabeads M-280 Streptavidin. The beads were washed extensively with PBS containing 0.05% Tween 20 (PBST) and the bound phage was eluted by incubating the wells with 100 mM Glycine (pH 2.7) for 15 minutes. Eluted phage was neutralized with 1.5 M Tris, pH 8.8, amplified using TG1 cells and M13/KO7 helper phage, and grown overnight at 37° C. in 2YT, 50 μg/mL carbenacillin, and 50 μg/mL kanamycin. The titers of phage eluted from antigen immobilized beads were compared to titers of phage recovered from beads without antigen to assess enrichment. Selection stringency was increased by both decreasing concentration of biotin-r-Tau (from 10 nM to 0.1 nM) during binding and increasing the competition time (from 0 to 2 hours at room temperature) with 1 μM of unlabeled r-Tau in solution.

### SPR Assessment of Variants

[0861] Humanized variants of murine anti-Tau antibody 1C7 (hulC7 variants) were expressed as IgG by 293 transient transfection. IgG was purified with protein A affinity chromatography. The affinity of each hulC7 IgG variant for r-Tau was determined by surface plasmon resonance using a Biacore™ T200 instrument. Biacore™ Series S CM5 sensor chips were immobilized with monoclonal mouse anti-human IgG (Fc) antibody (Human antibody capture kit from GE Healthcare). Serial 3-fold dilutions of each hulC7 variant were injected at a flow rate of 30 L/minute. Each sample was analyzed with 3-minute association and 10-minute dissociation. After each injection, the chip was regenerated using 3 M MgCl₂. Binding response was corrected by subtracting the RU from a flow cell capturing an irrelevant IgG at similar density. A 1:1 Languir model of simultaneous fitting of kₒₙ and k_{off} was used for kinetics analysis.

### Results and Discussion

### Humanization of 1C7

[0862] The human acceptor framework used for humanization of murine anti-Tau antibody 1C7 is based on the human VL kappa IV consensus (VL_{KIV}) sequence and the human VHIII consensus (VH_{III}) sequence. The VL and VH regions of murine anti-Tau antibody 1C7 were aligned with the human VL_{KIV} and VH_{III} domains; hypervariable regions were identified and grafted into the human acceptor framework to generate hulC7 variants (FIG. 3). The chimeric murine anti-Tau antibody 1C7 binds to r-Tau with a monovalent affinity of 0.8 nM. The humanized 1C7 variants showed about two-fold weaker binding to r-Tau with affinities around 1.6 nM (Table 8).

TABLE 8
Summary of binding kinetics of humanized 1C7 clones

| | kₐ (1/Ms) | k_{d} (1/s) | K_{D} (pM) |
|---|---|---|---|
| 1C7.IgG | 8.6E+05 | 7.3E−04 | 0.8 |
| hu1C7.v1 | 7.2E+05 | 1.3E−03 | 1.8 |
| hu1C7.v2 (S49A) | 7.6E+05 | 1.1E−03 | 1.5 |
| hu1C7.v3 (S75A) | 7.3E+05 | 1.2E−03 | 1.7 |
| hu1C7.v4 (S49A, S75A) | 6.6E+05 | 1.1E−03 | 1.8 |

### Affinity Maturation

[0863] Affinity maturation libraries were explored in an effort to recruit further improvements using the framework of hulC7.v2, which contains the Vernier position (S49A) in the heavy chain. Each hypervariable region was randomized using Kunkle mutagenesis (a total of 13 libraries, 6 NNK libraries and 7 soft randomized libraries; Table 7). The affinity maturation libraries were panned 4 rounds in solution with biotinylated r-Tau. Selection stringency was gradually increased by decreasing the concentration of biotin-r-Tau (from 10 to 0.1 nM) and increasing the competition time (from 0 to 2 hours at room temperature) with 1 μM of unlabeled r-Tau. Significant enrichments were observed for the L1, L3, H1, and H3 libraries.

[0864] Clones from the last round were picked for DNA sequence analysis. Sequence changes were identified in each CDR (Table 9A). The selected clones and additional combination variants were generated as IgGs by 293 transient transfection. Binding affinities were evaluated using Biacore™. Five to ten-fold off-rate improvements were observed for the affinity improved variants. All variants showed double to triple digit picomolar affinity to r-Tau (Table 10A).

TABLE 9A
Sequence alignments of CDR-H1, CDR-H3, CDR-L1,
and CDR-L3 from the affinity matured variants

| H1 (SEQ ID NO: 22) | G | F | T | F | S | S | Y | G | M | S | | | | | | | |
|---|---|---|---|---|---|---|---|---|---|---|---|---|---|---|---|---|---|
| H1_1 (SEQ ID NO: 150) | G | F | K | F | S | R | V | G | V | S | | | | | | | |
| H1_2 (SEQ ID NO: 151) | G | F | T | F | S | R | V | G | T | S | | | | | | | |
| H1_3 (SEQ ID NO: 152) | G | F | R | F | S | R | V | G | M | S | | | | | | | |
| H1_4 (SEQ ID NO: 153) | G | F | R | F | S | G | P | G | M | S | | | | | | | |
| H1_5 (SEQ ID NO: 154) | V | I | K | W | R | I | Y | G | M | S | | | | | | | |
| H3 (SEQ ID NO: 24) | A | R | L | P | Y | | | | | | | | | | | | |
| H3_1 (SEQ ID NO: 155) | A | K | L | P | F | | | | | | | | | | | | |
| L1 (SEQ ID NO: 26) | K | S | S | Q | S | L | L | N | S | G | N | Q | K | N | Y | L | T |
| L1_1 (SEQ ID NO: 156) | K | S | S | H | S | L | Y | S | S | R | R | H | K | H | Y | L | A |
| L1_2 (SEQ ID NO: 157) | K | S | S | Q | S | L | L | R | S | G | K | R | Q | N | Y | L | V |
| L1_3 (SEQ ID NO: 158) | K | S | S | Q | S | L | H | R | S | G | T | Q | K | D | Y | L | V |
| L3 (SEQ ID NO: 28) | Q | Q | Y | N | S | Y | P | L | T | | | | | | | | |
| L3_1 (SEQ ID NO: 159) | Q | K | Y | N | S | Y | P | L | T | | | | | | | | |
| L3_2 (SEQ ID NO: 160) | Q | K | Y | D | S | Y | P | L | T | | | | | | | | |
| L3_3 (SEQ ID NO: 161) | Q | H | Y | R | T | Y | P | L | T | | | | | | | | |
| L3_4 (SEQ ID NO: 162) | Q | H | Y | R | S | Y | P | M | T | | | | | | | | |

TABLE 10A
Summary of binding kinetics of affinity
matured clones based on hu1C7.v2

| | kₐ (1/Ms) | k_{d} (1/s) | K_{D} (pM) |
|---|---|---|---|
| hu1C7.v2 | 7.6E+05 | 1.1E−03 | 1500 |
| Clone with H1_1 | 2.07E+06 | 2.52E−04 | 122 |
| Clone with H1_2 | 1.56E+06 | 1.44E−04 | 92 |
| Clone with H1_4 | 1.32E+06 | 2.30E−04 | 174 |
| Clone with H1_5 | 1.34E+06 | 2.44E−04 | 183 |
| Clone with H3_1 | 1.97E+06 | 4.78E−04 | 242 |
| Clone with L1_1 | 1.54E+06 | 2.97E−04 | 192 |
| Clone with L1_3 | 2.15E+06 | 2.86E−04 | 133 |
| Clone with L1_3 and H1_4 | 2.28E+06 | 8.72E−05 | 38 |
| Clone with L1_3 and H1_1 | 1.64E+06 | 1.13E−04 | 69 |
| Clone with L1_3 and H3_1 | 2.36E+06 | 1.45E−04 | 62 |

[0865] A further round of affinity maturation was performed by mutating certain amino acids in selected CDR-H1, CDR-L1, and CDR-L3 sequences from Table 9A, as well as the sequence of CDR-H2 (SEQ ID NO:23) of hulC7.v2. Sequence changes were identified in each CDR (Table 9B). Binding affinities were evaluated using Biacore™ (Table 10B).

TABLE 9B
Sequence alignments of CDR-H1, CDR-H2, CDR-L1,
and CDR-L3 from the affinity matured variants

| H1_1 (SEQ ID NO: 150) | G | F | K | F | S | R | V | G | V | S | | | | | | | |
|---|---|---|---|---|---|---|---|---|---|---|---|---|---|---|---|---|---|
| H1_1-1 (SEQ ID NO: 420) | G | F | T | F | S | R | V | G | V | S | | | | | | | |
| H1_1-2 (SEQ ID NO: 421) | G | F | K | F | S | S | V | G | V | S | | | | | | | |
| H1_1-3 (SEQ ID NO: 422) | G | F | K | F | S | Q | V | G | V | S | | | | | | | |
| H1_1-4 (SEQ ID NO: 423) | G | F | K | F | S | M | V | G | V | S | | | | | | | |
| H1_1-5 (SEQ ID NO: 424) | G | F | K | F | S | R | Y | G | V | S | | | | | | | |
| H1_1-6 (SEQ ID NO: 425) | G | F | K | F | S | R | V | G | M | S | | | | | | | |
| H1_2 (SEQ ID NO: 151) | G | F | T | F | S | R | V | G | T | S | | | | | | | |
| H1_2-1 (SEQ ID NO: 426) | G | F | T | F | S | S | V | G | T | S | | | | | | | |
| H1_2-2 (SEQ ID NO: 427) | G | F | T | F | S | M | V | G | T | S | | | | | | | |
| H1_2-3 (SEQ ID NO: 428) | G | F | T | F | S | Q | V | G | T | S | | | | | | | |
| H1_2-4 (SEQ ID NO: 429) | G | F | T | F | S | L | V | G | T | S | | | | | | | |
| H1_2-5 (SEQ ID NO: 430) | G | F | T | F | S | K | V | G | T | S | | | | | | | |
| H1_2-6 (SEQ ID NO: 431) | G | F | T | F | S | R | Y | G | T | S | | | | | | | |
| H1_2-7 (SEQ ID NO: 432) | G | F | T | F | S | R | V | G | M | S | | | | | | | |
| H1_4 (SEQ ID NO: 153) | G | F | R | F | S | G | P | G | M | S | | | | | | | |
| H1_4-1 (SEQ ID NO: 433) | G | F | T | F | S | G | P | G | M | S | | | | | | | |
| H1_4-2 (SEQ ID NO: 434) | G | F | Q | F | S | G | P | G | M | S | | | | | | | |
| H1_4-3 (SEQ ID NO: 435) | G | F | M | F | S | G | P | G | M | S | | | | | | | |
| H1_4-4 (SEQ ID NO: 436) | G | F | R | F | S | S | P | G | M | S | | | | | | | |
| H1_4-5 (SEQ ID NO: 437) | G | F | R | F | S | G | Y | G | M | S | | | | | | | |
| H1_HCv2 (SEQ ID NO: 586) | G | F | T | F | S | Q | V | G | M | S | | | | | | | |
| H1_HCv5 (SEQ ID NO: 587) | G | F | K | F | S | G | P | G | M | S | | | | | | | |
| H2 (SEQ ID NO: 23) | S | I | S | G | D | G | G | S | Y | I | H | Y | A | D | S | V | K |
| H2_1 (SEQ ID NO: 438) | S | I | S | G | E | G | G | S | Y | I | H | Y | A | D | S | V | K |
| H2_2 (SEQ ID NO: 439) | S | I | S | G | T | G | G | S | Y | I | H | Y | A | D | S | V | K |
| H2_3 (SEQ ID NO: 440) | S | I | S | G | S | G | G | S | Y | I | H | Y | A | D | S | V | K |
| H2_4 (SEQ ID NO: 441) | S | I | S | G | D | A | G | S | Y | I | H | Y | A | D | S | V | K |
| H2_5 (SEQ ID NO: 442) | S | I | S | G | D | G | G | S | Y | I | H | Y | A | S | S | V | K |
| H2_6 (SEQ ID NO: 443) | S | I | S | G | D | G | G | S | Y | I | H | Y | A | D | A | V | K |
| L1 (SEQ ID NO: 26) | K | S | S | Q | S | L | L | N | S | G | N | Q | K | N | Y | L | T |
| L1_4 (SEQ ID NO: 444) | K | S | S | Q | S | L | L | Y | S | G | N | Q | K | N | Y | L | T |
| L1_5 (SEQ ID NO: 445) | K | S | S | Q | S | L | L | S | S | G | N | Q | K | N | Y | L | T |
| L1_6 (SEQ ID NO: 446) | K | S | S | Q | S | L | L | Q | S | G | N | Q | K | N | Y | L | T |
| L1_7 (SEQ ID NO: 447) | K | S | S | Q | S | L | L | N | A | G | N | Q | K | N | Y | L | T |
| L1_3 (SEQ ID NO: 158) | K | S | S | Q | S | L | H | R | S | G | T | Q | K | D | Y | L | V |
| L1_3-1(SEQ ID NO: 448) | K | S | S | Q | S | L | V | R | S | G | T | Q | K | D | Y | L | V |
| L1_3-2(SEQ ID NO: 449) | K | S | S | Q | S | L | L | R | S | G | T | Q | K | D | Y | L | V |
| L1_3-3(SEQ ID NO: 450) | K | S | S | Q | S | L | H | Y | S | G | T | Q | K | D | Y | L | V |
| L1_3-4(SEQ ID NO: 451) | K | S | S | Q | S | L | H | N | S | G | T | Q | K | D | Y | L | V |
| L1_3-5(SEQ ID NO: 452) | K | S | S | Q | S | L | H | M | S | G | T | Q | K | D | Y | L | V |
| L1_3-6(SEQ ID NO: 453) | K | S | S | Q | S | L | H | Q | S | G | T | Q | K | D | Y | L | V |
| L1_3-7(SEQ ID NO: 454) | K | S | S | Q | S | L | H | K | S | G | T | Q | K | D | Y | L | V |
| L1_3-8(SEQ ID NO: 455) | K | S | S | Q | S | L | H | L | S | G | T | Q | K | D | Y | L | V |
| L1_3-9(SEQ ID NO: 456) | K | S | S | Q | S | L | H | R | S | G | N | Q | K | D | Y | L | V |
| L1_3-10(SEQ ID NO: 457) | K | S | S | Q | S | L | H | R | S | G | T | Q | K | N | Y | L | V |
| L1_3-11(SEQ ID NO: 458) | K | S | S | Q | S | L | H | R | S | G | T | Q | K | D | Y | L | A |
| L1_3-12(SEQ ID NO: 459) | K | S | S | Q | S | L | L | Y | S | G | N | Q | K | D | Y | L | V |
| L3 (SEQ ID NO: 28) | Q | Q | Y | N | S | Y | P | L | T | | | | | | | | |
| L3_5 (SEQ ID NO: 460) | Q | Q | Y | Y | S | Y | P | L | T | | | | | | | | |
| L3_6 (SEQ ID NO: 461) | Q | Q | Y | S | S | Y | P | L | T | | | | | | | | |
| L3_7 (SEQ ID NO: 462) | Q | Q | Y | N | A | Y | P | L | T | | | | | | | | |

TABLE 10B
Summary of binding kinetics of further affinity
matured clones based on hu1C7.v2

| | kₐ (1/Ms) | k_{d} (1/s) | K_{D} (nM) |
|---|---|---|---|
| hu1C7.v2 | 5.85E+05 | 8.51E−04 | 1454 |
| Clone with H1_2 | 2.76E+05 | 1.32E−04 | 478 |
| Clone with H1_2-1 | 1.41E+05 | 1.83E−04 | 1298 |
| Clone with H1_2-2 | 1.28E+05 | 9.71E−05 | 759 |
| Clone with H1_2-3 | 1.97E+05 | 9.39E−05 | 477 |
| Clone with H1_2-4 | 1.07E+05 | 1.51E−04 | 1411 |
| Clone with H1_2-5 | 2.49E+05 | 1.44E−04 | 578 |
| Clone with H1_2-6 | 7.55E+05 | 2.62E−04 | 347 |
| Clone with H1_4 | 5.64E+05 | 1.88E−04 | 333 |
| Clone with H1_4-1 | 1.72E+05 | 1.44E−04 | 837 |
| Clone with H1_4-2 | 3.08E+05 | 1.28E−04 | 416 |
| Clone with H1_4-3 | 4.04E+05 | 2.03E−04 | 502 |
| Clone with H1_4-4 | 3.31E+05 | 1.26E−03 | 3807 |
| Clone with H1_4-5 | 2.76E+05 | 1.63E−04 | 591 |
| Clone with H2_1 | 4.46E+05 | 3.69E−03 | 8277 |
| Clone with H2_2 | 4.15E+05 | 3.78E−03 | 9109 |
| Clone with H2_3 | 4.22E+05 | 4.08E−03 | 9681 |
| Clone with H2_4 | 4.84E+05 | 3.09E−03 | 6397 |
| Clone with H2_5 | 4.65E+05 | 1.76E−03 | 3788 |
| Clone with H2_6 | 4.62E+05 | 1.75E−03 | 3795 |
| Clone with L1_4 | 1.15E+06 | 6.62E−04 | 577 |
| Clone with L1_5 | 6.36E+05 | 8.85E−04 | 1391 |
| Clone with L1_6 | 1.17E+06 | 7.80E−04 | 665 |
| Clone with L1_7 | 1.10E+06 | 7.19E−04 | 651 |
| Clone with L1_3 | 1.22E+06 | 1.33E−04 | 109 |
| Clone with L1_3-1 | 1.01E+06 | 2.13E−04 | 211 |
| Clone with L1_3-2 | 1.10E+06 | 1.43E−04 | 130 |
| Clone with L1_3-3 | 2.72E+06 | 2.14E−04 | 78 |
| Clone with L1_3-4 | 1.50E+06 | 3.10E−04 | 206 |
| Clone with L1_3-5 | 1.05E+06 | 4.42E−04 | 419 |
| Clone with L1_3-6 | 1.09E+06 | 3.79E−04 | 349 |
| Clone with L1_3-7 | 1.12E+06 | 3.08E−04 | 275 |
| Clone with L1_3-8 | 7.67E+05 | 3.91E−04 | 510 |
| Clone with L1_3-9 | 1.13E+06 | 1.54E−04 | 136 |
| Clone with L1_3-10 | 9.37E+05 | 1.47E−04 | 157 |
| Clone with L1_3-11 | 9.65E+05 | 2.23E−04 | 231 |
| Clone with L3_5 | 8.48E+05 | 7.87E−04 | 928 |
| Clone with L3_6 | 8.26E+05 | 5.70E−04 | 690 |
| Clone with L3_7 | 6.85E+05 | 8.17E−04 | 1192 |
| Clone with L1_3, L3, | 9.82E+05 | 1.16E−04 | 119 |
| and H1_HCv2 | | | |
| Clone with L1_3, L3-6, | 1.07E+05 | 1.80E−04 | 168 |
| and H1_HCv2 | | | |
| Clone with L1_3-3, L3-6, | 1.02E+05 | 1.80E−04 | 177 |
| and H1_HCv2 | | | |
| Clone with L1_3-3, L3-6, | 1.07E+05 | 1.64E−04 | 153 |
| and H1_HCv5 | | | |

### Example 6. Anti-Tau Hybridoma Antibody Discovery and Screening

[0866] This example illustrates the design, generation, and characterization of anti-Tau hybridoma antibodies that specifically bind to multiple Tau splice isoforms and that specifically bind to both phosphorylated human Tau and unphosphorylated human Tau. The antibodies also exhibit cross-species reactivity between human Tau and cynomolgus Tau.

[0867] A schematic for the hybridoma anti-Tau antibody discovery and screening program is shown in FIG. 18. As detailed below, mice were immunized with recombinant phosphorylated Tau (p-Tau), splenocytes and lympohocytes were harvested, and B-cells were processed and used to generate hybridoma library. Subsequently, anti-Tau antibodies that bound to r-Tau were selected in a primary screen. Positive hits from the primary screen were carried into a secondary screening where they were screened by ELISA for binding to r-Tau, p-Tau, and cyno-Tau. Further characterization of the hits on the five different Tau isoforms (Tau352 (0N3R), Tau383 (0N4R), Tau381 (1N3R), Tau410 (2N3R), and Tau441 (2N4R)), N-terminal truncated Tau (Tau (50-441)), and C-terminal truncated Tau (Tau (1-421)) was performed by the same method. The antibody clones were tested for binding affinity and binding characteristics and epitope mapping of high-affinity antibodies was performed.

### Antigen Production

### Recombinant Tau

[0868] Full-length (441 amino acid in length) recombinant Tau (r-Tau) was produced in E. coli BL21(DE3) cells. r-Tau was originally produced with a His6-Smt3 tag, which was used for affinity purification and subsequently cleaved and removed.

In Vitro r-Tau Phosphorylation

[0869] Recombinant Tau (r-Tau) was phosphorylated in vitro by incubation with 1:1 amounts of PKA and GSK3β in 50 mM MES, pH 6.8, 100 mM NaCl, 0.5 mM EGTA, 5 mM MgCl₂, and 1 mM ATP for 24 hours at room temperature. Phosphorylated r-Tau, p-Tau, was then purified to remove kinases and endotoxins.

### Immunization of Mice

[0870] Tau knockout mice were immunized with recombinant hyperphosphorylated Tau (p-Tau). Immunizations were performed via Hock or footpad weekly with 5-10 μg of antigen in Ribi or Freund's adjuvant until serum antibody against r-Tau or p-Tau reacted in an ELISA to a dilution of greater than 10⁵, typically around six to eight weeks. Mice were given a final boost without adjuvent via intraperitoneal injection and sacrificed 3 days after the boost. Spleens and popliteal and inguinal lymph nodes were harvested, made into single cell suspensions by passing through cell strainers, and then the splenocytes and lymphocytes were used for hybridoma generation.

### Generation of Hybridoma Library

[0871] B-cells harvested from lymph nodes were processed and counted. They were mixed with P3X63Ag8 cells 1:1 and fused using BTX Hybrimune Electrofusion apparatus. The fused hybridomas were plated in 50-96 well plates with 100 μL/well of HAT (Hypoxanthine-Aminopterin-Thymidine) selection media. The plates were fed with HT (Hypoxanthine Thymidine) after a week. After two weeks, 50 L/well of supernatant was collected and screened for antigen specific binding.

Screening Antibodies for Binding to r-Tau, p-Tau, and Cyno-Tau

[0872] Primary screening was performed by coating 96-well ELISA Nunc plates overnight at 4° C. with 1 μg/mL r-Tau in PBS. The plates were washed three times with PBST using a Biotek plate washer. 50 L/well of hybridoma supernatants were added to the plates with incubation at room temperature for 1 hour. Plates were washed three times with PBST. A secondary detection antibody goat X m HRP (Southern Biotech) at 1:2000 dilution, 50 μL/well was added to the plate and incubated for 1 hour at room temperature. At the end of an hour, plates were washed three time with PBST. Plates were developed with 50 μL/well of TMB substrate (Thermo Fisher) and quenched with 50 μL/well of 1N sulfuric acid. The signal was quantified on a BioTek® plate reader at A450. Wells with an OD three times the background for r-Tau were considered positive and carried forward for secondary screening.

[0873] Positives from primary screening were carried forward into the secondary screening where they were screened by ELISA using the above protocol on r-Tau, p-Tau, and cyno-Tau for binding and cross-reactivity. Further characterization on the five different Tau isoforms was performed by the same method.

[0874] FIGS. 19A-19C depict the results of ELISAs in which clones 17G2.A1, 19F7.C9, and 24D2.B2 all bound to recombinant Tau441 (r-Tau), hyperphosphorylated Tau441 (p-Tau), cyno Tau441 (cyno-Tau), splice isoforms of human Tau (Tau352 (0N3R), Tau383 (0N4R), Tau381 (1N3R), Tau410 (2N3R), and Tau441 (2N4R)), N-terminal truncated Tau (Tau (50-441)), and C-terminal truncated Tau (Tau (1-421)). Clones 17G2.A1, 19F7.C9, and 24D2.B2 also all bound in the middle region of Tau (Tau (50-421); residues 50-421 of SEQ ID NO:1).

### Biacore Assessment of the Selected Anti-Tau Antibodies

[0875] The affinity of each hybridoma antibody for r-Tau was determined by surface plasmon resonance using a Biacore™ T200 instrument. Biacore™ Series S CM5 sensor chips were immobilized with polyclonal rabbit anti-mouse IgG (Fc) antibody (mouse antibody capture kit from GE Healthcare). 1 μg/mL of antibody was captured for 1 minute on each flow cell and serial 3-fold dilutions of r-Tau were injected at a flow rate of 30 L/min. Each sample was analyzed with a 3-minute association and a 10-minute dissociation. After each injection, the chip was regenerated using 10 mM Glycine-HCl (pH 1.7). Binding response was corrected by subtracting the RU from a flow cell capturing an irrelevant IgG at similar density. A 1:1 Languir model of simultaneous fitting of kₒₙ and k_{off} was used for kinetics analysis.

[0876] As shown in FIGS. 20A through 20C, clones 17G2.A1, 19F7.C9, and 24D2.B2 all exhibited fast on-rates and slow off-rates, consistent with strong binding affinity for r-Tau. Table 11 below further shows binding kinetics for clones 17G2.A1, 19F7.C9, and 24D2.B2 including their single digit nM binding affinity as measured by Biacore™, consistent with strong affinity for r-Tau.

TABLE 11
Binding kinetics of clones 17G2.A1, 19F7.C9, and 24D2.B2

| Ligand | kₐ (1/Ms) | k_{d} (1/s) | K_{D} (M) |
|---|---|---|---|
| 17G2.A1 | 1.55E+05 | 3.83E−04 | 2.48E−09 |
| 19F7.C9 | 8.25E+05 | 2.40E−03 | 2.91E−09 |
| 24D2.B2 | 6.15E+04 | 1.44E−04 | 2.34E−09 |

### Epitope Mapping Using Phage-Display

[0877] Full-length Tau and truncated Tau were genetically fused to the C-terminal truncated phage coat protein P3 and displayed on phage particles. To perform phage ELISA, 60 μL of 1 g/mL anti-Tau antibodies in PBS was coated on maxi-sorp 96-well plate at 4° C. overnight. Next day, the plate was washed with PBST and blocked with ELISA buffer (PBS with 0.5% BSA) at room temperature for 1 hour. Freshly prepared phage particles were diluted in ELISA buffer and incubated on plate for 1 hour at room temperature. The plate was washed and then HRP conjugated anti-M13 Monoclonal Conjugate (GE 27942101) was added for another hour at room temperature. After extensive washing, the plate was developed with 60 μL/well of TMB one component substrate and the development was stopped with 60 μL/well of the 650 nm stop solution when the color is sufficiently developed (typically 1-5 minutes). Percentage of binding to each truncated Tau was calculated as the ratio of binding signal to the signal from full-length Tau.

### Epitope Mapping Using Peptide Microarrays

[0878] Full-length human Tau (encoded by the microtubule-associated protein Tau isoform 2 gene (MAPT), amino acid sequence NCBI Reference Sequence No. NP_005901.2, SEQ ID NO: 1, variant designation “2N4R”) was divided into 15 amino acid peptides, offset by 5 amino acids (overlapping by 10 amino acids). Peptides were synthesized and covalently attached to silica slides in triplicate with a spot size of 0.5 mm (obtained from JPT Technologies, Berlin, Germany). Antibodies muIgG were diluted to a concentration of 30 μg/mL in 3% bovine serum albumin in Tris-buffered saline (10 mM Tris, pH 7.5, 150 mM NaCl) supplemented with 0.05% Tween® 20 (3% BSA-TBST). Diluted antibodies were allowed to bind to peptides printed onto slides for 2 hours at room temperature as described in the Pepstar™ user manual (JPT Technologies). Following extensive washing (5×5 min TBST), slides were incubated with secondary antibodies (donkey anti-mouse IgG, Alexafluor 647 conjugate, 5 μg/mL in 3% BSA-TBST) for 1 hour at room temperature. After extensive washing, (5×5 minutes TBST, 5×5 minutes ultrapure water), slides were dried under a stream of nitrogen and imaged on the Opera Phenix in the 647 nm channel. Images were aligned to peptide array definition file using Galviewer software obtained from JPT Technologies and ImageJ software with control mouse IgG serving as landmarks.

### AD Patient Cerebral Spinal Fluid (CSF) Immunoprecipitation

[0879] Patient CSF was purchased from PrecisionMed. Protein A beads (SureBeads; Bio-Rad) were blocked in 2% BSA for 1 hour at 24° C. and then washed three times in TBST. Both Tween®20 (0.02%) and EDTA-free complete protease inhibitors (Roche) were added to the CSF prior to incubation with antibodies. CSF (50 μL) was incubated for 1 hour at 4° C. with 2 μg of antibody. The CSF/antibody mixture was then added to 100 μL of blocked/washed beads and incubated for 18 hours at 4° C. The unbound fraction was collected and the beads were washed three times with 1 mL of wash buffer (50 mM Tris pH7, 100 mM NaCl, 0.5% TritonX-100) followed by one wash with 1 mL PBS. The bound fraction was then eluted by incubation with 45 μL elution buffer (Pierce) for 10 minutes and neutralized by addition of 5 μL Tris buffer (pH 8.8).

[0880] As shown in FIG. 21, both the benchmark anti-Tau Ab017 and anti-Tau 17G2.A1 are capable of binding significant amounts of Tau from human CSF from Alzheimer's disease (AD) patients. Each dot represents a unique AD patient sample and each line indicates the mean of three samples for each of negative control, Ab017, and anti-Tau 17G2.A1.

### Example 7. Epitope Mapping Confirmation of 17G2.A1

### Direct Binding ELISA

[0881] The peptide corresponding to amino acids 186-205 of SEQ ID NO:1 (GEPPKSGDRSGYSSPGSPGT; SEQ ID NO: 178) was synthesized as an N-terminal biotinylated peptide. ELISA plates (Corning 3690) were coated with neutravidin (1 μg/ml) and blocked (3% BSA/TBST). The peptides were diluted in 3% BSA/TBST in 0.5 log dilutions starting at 1 μg/mL and bound to neutravidin coated plates. Plates were washed 5× with TBST between all steps. 17G2.A1 was diluted to 5 μg/mL in 3% BSA/TBST and incubated for 1 hour at room temperature, followed by incubation with anti-mouse IgG-HRP (Novex) diluted 1/5000 in BSA/TBST for 45 minutes at room temperature. ELISAs were developed with 50 μL of 1-step TMB Ultra.

### Competition Binding ELISA

[0882] ELISA plates (Corning 3690) were coated with recombinant Tau (r-Tau) (Tau441; SEQ ID NO:1) (made at Ceptor) in 0.5 log dilutions starting at 5 μg/mL and blocked with 3% BSA/TBST. 17G2.A1 was diluted to 2.5 μg/mL in 3% BSA/TBST and co-incubated with 17G2.A1 peptide (as described above) at decreasing concentrations from 50 μg/mL to 0 μg/mL in 0.5 log steps for 1 hour at room temperature. The plate was then incubated with anti-mouse IgG-HRP (Novex) diluted 1/5000 in BSA/TBST for 45 minutes at room temperature. Plates were washed 5× with TBST between all steps. ELISAs were developed with 50 μL of 1-step TMB Ultra.

[0883] The results of the direct binding and competiton binding ELISAs are shown in FIGS. 22A and 22B. Anti-Tau antibody 17G2.A1 displays specific binding to an epitope within amino acids 186-205 of SEQ ID NO:1. Further, when r-Tau is immobilized on the plate, the epitope peptide GEPPKSGDRSGYSSPGSPGT (SEQ ID NO:178) competes for 17G2.A1 binding in a dose-dependent manner.

### Example 8. Modified Fc Polypeptides that Bind to TfR

[0884] This example describes modifications to Fc polypeptides to confer transferrin receptor (TfR) binding and transport across the blood-brain barrier (BBB).

[0885] Unless otherwise indicated, the positions of amino acid residues in this section are numbered based on EU index numbering for a human IgG1 wild-type Fc region.

### Generation and Characterization of Fc Polypeptides Comprising Modifications at Positions 384, 386, 387, 388, 389, 390, 413, 416, and 421 (CH3C Clones)

[0886] Yeast libraries containing Fc regions having modifications introduced into positions including amino acid positions 384, 386, 387, 388, 389, 390, 413, 416, and 421 were generated as described below. Illustrative clones that bind to TfR are shown in Tables 13 and 14.

[0887] After an additional two rounds of sorting, single clones were sequenced and four unique sequences were identified. These sequences had a conserved Trp at position 388, and all had an aromatic residue (i.e., Trp, Tyr, or His) at position 421. There was a great deal of diversity at other positions.

[0888] The four clones selected from the library were expressed as Fc fusions to Fab fragments in CHO or 293 cells, and purified by Protein A and size-exclusion chromatography, and then screened for binding to human TfR in the presence or absence of holo-Tf by ELISA. The clones all bound to human TfR and the binding was not affected by the addition of excess (5 μM) holo-Tf Clones were also tested for binding to 293F cells, which endogenously express human TfR. The clones bound to 293F cells, although the overall binding was substantially weaker than the high-affinity positive control.

[0889] Next, it was tested whether clones could internalize in TfR-expressing cells using clone CH3C.3 as a test clone. Adherent HEK 293 cells were grown in 96-well plates to about 80% confluence, media was removed, and samples were added at 1 μM concentrations: clone CH3C.3, anti-TfR benchmark positive control antibody (Ab204), anti-BACE1 benchmark negative control antibody (Ab 107), and human IgG isotype control (obtained from Jackson Immunoresearch). The cells were incubated at 37° C. and 8% CO₂ concentration for 30 minutes, then washed, permeabilized with 0.1% Triton™ X-100, and stained with anti-human-IgG-Alexa Fluor® 488 secondary antibody. After additional washing, the cells were imaged under a high content fluorescence microscope (i.e., an Opera Phenix™ system), and the number of puncta per cell was quantified. At 1 μM, clone CH3C.3 showed a similar propensity for internalization to the positive anti-TfR control, while the negative controls showed no internalization.

### Further Engineering of Clones

[0890] Additional libraries were generated to improve the affinity of the initial hits against human TfR using a soft randomization approach, wherein DNA oligos were generated to introduce soft mutagenesis based on each of the original four hits. Additional clones were identified that bound TfR and were selected. The selected clones fell into two general sequence groups. Group 1 clones (i.e., clones CH3C.18, CH3C.21, CH3C.25, and CH3C.34) had a semi-conserved Leu at position 384, a Leu or His at position 386, a conserved and a semi-conserved Val at positions 387 and 389, respectively, and a semi-conserved P-T-W motif at positions 413, 416, and 421, respectively. Group 2 clones had a conserved Tyr at position 384, the motif TXWSX at positions 386-390, and the conserved motif S/T-E-F at positions 413, 416, and 421, respectively. Clones CH3C.18 and CH3C.35 were used in additional studies as representative members of each sequence group.

### Epitope Mapping

[0891] To determine whether the engineered Fc regions bound to the apical domain of TfR, TfR apical domain was expressed on the surface of phage. To properly fold and display the apical domain, one of the loops had to be truncated and the sequence needed to be circularly permuted. Clones CH3C.18 and CH3C.35 were coated on ELISA plates and a phage ELISA protocol was followed. Briefly, after washing and blocking with 1% PBSA, dilutions of phage displaying were added and incubated at room temperature for 1 hour. The plates were subsequently washed and anti-M13-HRP was added, and after additional washing the plates were developed with TMB substrate and quenched with 2N H₂SO₄. Both clones CH3C.18 and CH3C.35 bound to the apical domain in this assay.

### Paratope Mapping

[0892] To understand which residues in the Fc domain were most important for TfR binding, a series of mutant clone CH3C.18 and clone CH3C.35 Fc regions was created in which each mutant had a single position in the TfR binding register mutated back to wild-type. The resulting variants were expressed recombinantly as Fab-Fc fusions and tested for binding to human or cyno TfR. For clone CH3C.35, positions 388 and 421 were important for binding; reversion of either of these to wild-type completely ablated binding to human TfR.

### Binding Characterization of Maturation Clones

[0893] Binding ELISAs were conducted with purified Fab-Fc fusion variants with human or cyno TfR coated on the plate, as described above. The variants from the clone CH3C.18 maturation library, clone CH3C.3.2-1, clone CH3C.3.2-5, and clone CH3C.3.2-19, bound human and cyno TfR with approximately equivalent EC₅₀ values, whereas the parent clones CH3C. 18 and CH3C.35 had greater than 10-fold better binding to human versus cyno TfR.

[0894] Next, it was tested whether the modified Fc polypeptides internalized in human and monkey cells. Using the protocol described above, internalization in human HEK 293 cells and rhesus LLC-MK2 cells was tested. The variants that similarly bound human and cyno TfR, clones CH3C.3.2-5 and CH3C.3.2-19, had significantly improved internalization in LLC-MK2 cells as compared with clone CH3C.35.

### Additional Engineering of Clones

[0895] Additional engineering to further affinity mature clones CH3C.18 and CH3C.35 involved adding additional mutations to the positions that enhanced binding through direct interactions, second-shell interactions, or structure stabilization. This was achieved via generation and selection from an “NNK walk” or “NNK patch” library. The NNK walk library involved making one-by-one NNK mutations of residues that are near to the paratope. By looking at the structure of Fc bound to FcγRI (PDB ID: 4W4O), 44 residues near the original modification positions were identified as candidates for interrogation. Specifically, the following residues were targeted for NNK mutagenesis: K248, R255, Q342, R344, E345, Q347, T359, K360, N361, Q362, S364, K370, E380, E382, S383, G385, Y391, K392, T393, D399, S400, D401, S403, K409, L410, T411, V412, K414, S415, Q418, Q419, G420, V422, F423, S424, S426, Q438, S440, S442, L443, S444, P4458, G446, and K447. The 44 single point NNK libraries were generated using Kunkel mutagenesis, and the products were pooled and introduced to yeast via electroporation, as described above for other yeast libraries.

[0896] The combination of these mini-libraries (each of which had one position mutated, resulting in 20 variants) generated a small library that was selected using yeast surface display for any positions that lead to higher affinity binding. Selections were performed as described above, using TfR apical domain proteins. After three rounds of sorting, clones from the enriched yeast library were sequenced, and several “hot-spot” positions were identified where certain point mutations significantly improved the binding to apical domain proteins. For clone CH3C.35, these mutations included E380 (mutated to Trp, Tyr, Leu, or Gln) and S415 (mutated to Glu). The sequences of the clone CH3 C.35 single and combination mutants are set forth in SEQ ID NOS:207-218. For clone CH3C.18, these mutations included E380 (mutated to Trp, Tyr, or Leu) and K392 (mutated to Gln, Phe, or His). The sequences of the clone CH3C.18 single mutants are set forth in SEQ ID NOS:201-206.

### Additional Maturation Libraries to Improve Clone CH3C.35 Affinity

[0897] An additional library to identify combinations of mutations from the NNK walk library, while adding several additional positions on the periphery of these, was generated as described for previous yeast libraries. In this library, the YxTEWSS (SEQ ID NO:635) and TxxExxxxF (SEQ ID NO:636) motifs were kept constant, and six positions were completely randomized: E380, K392, K414, S415, S424, and S426. Positions E380 and S415 were included because they were “hot spots” in the NNK walk library. Positions K392, S424, and S426 were included because they make up part of the core that may position the binding region, while K414 was selected due to its adjacency to position 415.

[0898] This library was sorted, as previously described, with the cyno TfR apical domain only. The enriched pool was sequenced after five rounds, and the sequences of the modified regions of the identified unique clones are set forth in SEQ ID NOS:222-239.

[0899] The next libraries were designed to further explore acceptable diversity in the main binding paratope. Each of the original positions (384, 386, 387, 388, 389, 390, 413, 416, and 421) plus the two hot spots (380 and 415) were individually randomized with NNK codons to generate a series of single-position saturation mutagenesis libraries on yeast. In addition, each position was individually reverted to the wild-type residue, and these individual clones were displayed on yeast. It was noted that positions 380, 389, 390, and 415 were the only positions that retained substantial binding to TfR upon reversion to the wild-type residue (some residual but greatly diminished binding was observed for reversion of 413 to wild-type).

[0900] The single-position NNK libraries were sorted for three rounds against the human TfR apical domain to collect the top ˜5% of binders, and then at least 16 clones were sequenced from each library. The results indicate what amino acids at each position can be tolerated without significantly reducing binding to human TfR, in the context of clone CH3C.35. A summary is below:

### Position 380: Trp, Leu, or Glu;

### Position 384: Tyr or Phe;

[0901] Position 386: Thr only;
Position 387: Glu only;
Position 388: Trp only;
Position 389: Ser, Ala, or Val (although the wild type Asn residue seems to retain some binding, it did not appear following library sorting);

### Position 390: Ser or Asn;

### Position 413: Thr or Ser;

### Position 415: Glu or Ser;

[0902] Position 416: Glu only; and
Position 421: Phe only.

[0903] The above residues, when substituted into clone CH3C.35 as single changes or in combinations, represent paratope diversity that retains binding to TfR apical domain. Clones having mutations at these positions include those shown in Table 14, and the sequences of the CH3 domains of these clones are set forth in SEQ ID NOS:214-218, 238, 240-270, and 469-475.

### Example 9. Additional Fc Positions that can be Modified to Confer TfR Binding

[0904] Additional modified Fc polypeptides that bind to transferrin receptor (TfR) were generated having modifications at alternative sites in the Fc region, e.g., at the following positions:

[0905] positions 274, 276, 283, 285, 286, 287, 288, and 290 (CH2A2 clones);

[0906] positions 266, 267, 268, 269, 270, 271, 295, 297, 298, and 299 (CH2C clones);

[0907] positions 268, 269, 270, 271, 272, 292, 293, 294, and 300 (CH2D clones);

[0908] positions 272, 274, 276, 322, 324, 326, 329, 330, and 331 (CH2E3 clones); or

[0909] positions 345, 346, 347, 349, 437, 438, 439, and 440 (CH3B clones).

[0910] Illustrative CH3B clones that bind to TfR are set forth in SEQ ID NOS:289-293. Illustrative CH2A2 clones that bind to TfR are set forth in SEQ ID NOS:394-398. Illustrative CH2C clones that bind to TfR are set forth in SEQ ID NOS:299-303. Illustrative CH2D clones that bind to TfR are set forth in SEQ ID NOS:304-308. Illustrative CH2E3 clones that bind to TfR are set forth in SEQ ID NOS:309-313.

### Example 10. Binding of Anti-Tau Antibody Comprising Modified Fc Polypeptides

### Generation of Anti-Tau Fab Fused to BBB-Penetrating Fc Polypeptide

[0911] The first of the two heavy chains was constructed by cloning the Fd (VH+CH1 regions) of clone 1C7 into an expression vector comprising an Fc engineered to bind to transferrin receptor and also comprising a “knob” mutation (T366W) to prevent homodimerization and promote heterodimerization with an Fc comprising “hole” mutations (T366W/L368A/Y407V). The Fc also comprises L234A, L235A, and P329G substitutions (according to the EU numbering scheme) to alter effector function. The first of the two heavy chains was designed to express the sequence of SEQ ID NO:317.

[0912] The second of the two heavy chains was constructed by cloning the Fd (VH+CH1 regions) of clone 1C7 into an expression vector comprising an Fc comprising “hole” mutations (T366W/L368A/Y407V), but lacking the transferrin receptor binding mutations. The Fc also comprises L234A, L235A, and P329G substitutions (according to the EU numbering scheme) to alter effector function. The second of the two heavy chains was designed to express the sequence of SEQ ID NO:316.

[0913] The light chain was constructed using an expression vector comprsing a polynucleotide corresponding to the sequence of SEQ ID NO:315.

[0914] The vectors comprising polynucleotides encoding aforementioned sequences of SEQ ID NOS:315-317 were co-transfected to ExpiCHO or Expi293 cells in the ratio of 1:1:2 (first heavy chain:second heavy chain:light chain). The expressed antibody (referred to “1C7/3C.35.21” herein) was purified by Protein A chromatography followed by preparative size-exclusion chromatography (SEC) by methods familiar to those with skill in the art.

### Tau/Transferrin Receptor (TfR) Binding

[0915] Simultaneous binding of recombinant Tau and TfR to 1 C7/3 C.35.21 was evaluated using a FortéBio® Octet® RED384 instrument with FortéBio® Streptavidin biosensors (FortéBio, 18-5019). Biotinylated recombinant Tau was diluted to a concentration of 10 μg/mL in kinetic buffer (obtained from FortéBio®) and captured onto a Streptavidin biosensor for 70 seconds. A baseline was then established for 1 minute in kinetic buffer. Anti-Tau antibody 1C7/3C.35.21 (50 μg/mL) was then bound to the immobilized recombinant Tau. The loaded biosensor was subsequently dipped into kinetic buffer to establish a new baseline. Recombinant human TfR (50 ng/mL) binding was measured for 1 minute on sensors with or without pre-bound recombinant Tau or

### 1C7/3C.35.21.

### Biacore Assessment of Anti-Tau Antibody 1 C7/3 C.35.21

[0916] The affinities of anti-Tau antibody 1C7/3C.35.21 for recombinant Tau and TfR were determined by surface plasmon resonance using a Biacore™ T200 instrument. Similar experimental protocols were used as described in previous examples.

### Tau Seeding Experiment

### Cell Culture and Assay

[0917] FRET sensor cells (Tau RD P301S FRET Biosensor, Catalog: CRL-3275, ATCC) were plated on poly-D-lysine (PDL)-coated 96-well plate (Corning BioCoat Poly-D-Lysine Muti-well Plates, Catalog: 356640) at the density of 30,000/well in 100 μL/well DMEM (DMEM High Glucose (Thermo Fisher Scientific; Catalog: 11-965-092) supplemented with 10% HI-FBS (Thermo Fisher Scientific; Catalog: 10082-147), 1×MEM Non-Essential Amino Acids Solution (Thermo Fisher Scientific; Catalog: 11-140-050), 1 mM sodium pyruvate (Thermo Fisher Scientific; Catalog: 11-360-070), and 1× Penicillin-Streptomycin-Glutamine (Thermo Fisher Scientific; Catalog: 10-378-016), and maintained at 37° C. with 5% CO₂.

[0918] Four to five hours after plating cells, the soluble fraction of human AD patient brain lysate and various antibodies, including negative control, chimeric IgG clone 1C7, and anti-Tau antibody 1C7/3C.35.21, were co-transfected using Lipofectamine 2000. The PBS-soluble fraction from AD patients' brain or age-matched healthy control brain containing 1 μg total protein (about 0.2 ng Tau protein) and the antibodies (2 μg) were diluted in 25 μL OPTI-MEM (Thermo Fisher Scientific, Catalog: 31-985-088) and incubated at 37° C. for 20 minutes. 25 μL OPTI-MEM containing 0.5 μL Lipofecatmine 2000 (Thermo Fisher Scientific, Catalog: 11-668-019) was then added to the protein-antibody mixture and further incubated at RT for 10 minutes. For each well, the media was entirely replaced with the transfection mixture and FRET sensor cells were kept at 37° C. with 5% CO₂ for 24 hours. FRET sensor cells transfected with protein seeds with or without the antibodies were then fixed in 1×PBS (Teknova, Catalog: P0191) containing 4% PFA (Electron Microscopy Sciences, Catalog: 15714-S) and 4% sucrose (Thermo Fisher Scientific, Catalog: S5-3) for 15 minutes at RT, followed by 4× wash with 1×PBS. Cells were then stained with CellMask Deep Red Plasma Membrane Stain (Thermo Fisher Scientific, Catalog: C10046) in 1×PBS with 0.2% TritonX-100 for 10 minutes at RT right before imaging, followed by 2× wash with 1×PBS.

### FRET Quantification

[0919] Fixed FRET sensor cells were imaged using the Opera Phenix High Content Screening System (PerkinElmer) and images were quantified using the Harmony software (PerkinElmer). To acquire FRET images, built-in CFP/YFP FRET acquisition protocol (excitation at 425 nm, donor emission at 435-480 nm, and acceptor emission at 500-550 nm), Alexa647 acquisition protocol (excitation at 640 nm, and emission at 650-760 nm), and water-immersion 20× objective (NA=1.0) under the non-confocal mode were used. FRET intensity was defined by the ratio of acceptor fluorescence to donor fluorescence (FRET=acceptor/donor) per each pixel. Cells were defined by Cell Mask staining. Mean FRET intensity was then calculated per each cell and histogram showing the distribution of the mean FRET intensity (per cell) was generated per each condition (e.g., cells transfected with AD patients' brain without antibody). The threshold to determine FRET positive cells was arbitrarily set around the highest mean FRET values of FRET sensor cells that were transfected with healthy control subjects' brain without antibodies (typically mean FRET intensity is greater than 2.5-2.6). FRET signal of FRET-positive cells was integrated (iFRET: integrated FRET) and normalized by integrated FRET intensity of all the cells per each well.

### Results

[0920] FIGS. 23A-23C show the SPR analysis of anti-Tau antibody 1C7/3C.35.21 and chimeric IgG clone 1C7 binding to human Tau and human TfR. The anti-Tau antibody 1C7/3C.35.21 bound to both Tau and TfR. The binding affinity of 1C7/3C.35.21 to Tau was comparable to the affinity of chimeric IgG clone 1C7 to Tau. FIG. 24 shows that anti-Tau antibody 1C7/3C.35.21 was capable of binding to both Tau and TfR simultaneously. Biotin-Tau was first bound to the Octet streptavidin sensor, and the sensor tips were then dipped into 1C7/3C.35.21 and TfR solutions sequentially. Representative sensorgrams in FIG. 24 show that 1C7/3C.35.21 bound to Tau and TfR (trace A) or Tau alone (trace B). No interaction was observed between Tau and TfR in the absence of 1C7/3C.35.21 (trace C) and neither 1C7/3C.35.21 nor TfR bound to sensor tips non-specifically (trace D). FIG. 25 shows that anti-Tau antibody 1C7/3C.35.21 prevented Tau seeding in HEK293T cells. AD brain lysate seeded Tau aggregation in the Tau Biosensor FRET, but this seeding was blocked by the addition of either chimeric IgG clone 1C7 (Tau^{1C7}) or 1C7/3C.35.21 (Tau^{1C7/3C.35.21}).

### Example 11. Methods

### Generation of Phage-Display Libraries

[0921] A DNA template coding for the wild-type human Fc sequence was synthesized and incorporated into a phagemid vector. The phagemid vector contained an ompA or pelB leader sequence, the Fc insert fused to c-Myc and 6×His epitope tags, and an amber stop codon followed by M13 coat protein pIII.

[0922] Primers containing “NNK” tricodons at the desired positions for modifications were generated, where N is any DNA base (i.e., A, C, G, or T) and K is either G or T. Alternatively, primers for “soft” randomization were used, where a mix of bases corresponding to 70% wild-type base and 10% of each of the other three bases was used for each randomization position. Libraries were generated by performing PCR amplification of fragments of the Fc region corresponding to regions of randomization and then assembled using end primers containing SfiI restriction sites, then digested with SfiI and ligated into the phagemid vectors. Alternatively, the primers were used to conduct Kunkel mutagenesis. The ligated products or Kunkel products were transformed into electrocompetent E. coli cells of strain TG1 (obtained from Lucigen®). The E. coli cells were infected with M13K07 helper phage after recovery and grown overnight, after which library phage were precipitated with 5% PEG/NaCl, resuspended in 15% glycerol in PBS, and frozen until use. Typical library sizes ranged from about 10⁹ to about 10¹¹ transformants. Fc-dimers were displayed on phage via pairing between pIII-fused Fc and soluble Fc not attached to pIII (the latter being generated due to the amber stop codon before pIII).

### Generation of Yeast-Display Libraries

[0923] A DNA template coding for the wild-type human Fc sequence was synthesized and incorporated into a yeast display vector. For CH2 and CH3 libraries, the Fc polypeptides were displayed on the Aga2p cell wall protein. Both vectors contained prepro leader peptides with a Kex2 cleavage sequence, and a c-Myc epitope tag fused to the terminus of the Fc.

[0924] Yeast display libraries were assembled using methods similar to those described for the phage libraries, except that amplification of fragments was performed with primers containing homologous ends for the vector. Freshly prepared electrocompetent yeast (i.e., strain EBY100) were electroporated with linearized vector and assembled library inserts. Electroporation methods will be known to one of skill in the art. After recovery in selective SD-CAA media, the yeast were grown to confluence and split twice, then induced for protein expression by transferring to SG-CAA media. Typical library sizes ranged from about 10⁷ to about 10⁹ transformants. Fc-dimers were formed by pairing of adjacently displayed Fc monomers.

### General Methods for Phage Selection

[0925] Phage methods were adapted from Phage Display: A Laboratory Manual (Barbas, 2001). Additional protocol details can be obtained from this reference.

### Plate Sorting Methods

[0926] Human TfR target was coated on MaxiSorp® microtiter plates (typically 200 μL at 1-10 g/mL in PBS) overnight at 4° C. All binding was done at room temperature unless otherwise specified. The phage libraries were added into each well and incubated overnight for binding. Microtiter wells were washed extensively with PBS containing 0.05% Tween® 20 (PBST) and bound phage were eluted by incubating the wells with acid (typically 50 mM HCl with 500 mM KCl, or 100 mM glycine, pH 2.7) for 30 minutes. Eluted phage were neutralized with 1 M Tris (pH 8) and amplified using TG1 cells and M13/KO7 helper phage and grown overnight at 37° C. in 2YT media containing 50 μg/mL carbenacillin and 50 μg/mL Kanamycin. The titers of phage eluted from a target-containing well were compared to titers of phage recovered from a non-target-containing well to assess enrichment. Selection stringency was increased by subsequently decreasing the incubation time during binding and increasing washing time and number of washes.

### Bead Sorting Methods

[0927] Antigen was biotinylated through free amines using NHS-PEG4-Biotin (obtained from Pierce™). For biotinylation reactions, a 3- to 5-fold molar excess of biotin reagent was used in PBS. Reactions were quenched with Tris followed by extensive dialysis in PBS. The biotinylated antigen was immobilized on streptavidin-coated magnetic beads, (i.e., M280-streptavidin beads obtained Thermo Fisher). The phage display libraries were incubated with the antigen-coated beads at room temperature for 1 hour. The unbound phage were then removed and beads were washed with PBST. The bound phage were eluted by incubating with 50 mM HCl containing 500 mM KCl (or 0.1 M glycine, pH 2.7) for 30 minutes, and then neutralized and propagated as described above for plate sorting.

[0928] After three to five rounds of panning, single clones were screened by either expressing Fc on phage or solubly in the E. coli periplasm. Such expression methods will be known to one of skill in the art. Individual phage supernatants or periplasmic extracts were exposed to blocked ELISA plates coated with antigen or a negative control and were subsequently detected using HRP-conjugated goat anti-Fc (obtained from Jackson Immunoresearch) for periplasmic extracts or anti-M13 (GE Healthcare) for phage, and then developed with TMB reagent (obtained from Thermo Fisher). Wells with OD₄₅₀ values greater than around 5-fold over background were considered positive clones and sequenced, after which some clones were expressed either as a soluble Fc fragment or fused to Fab fragments.

### General Methods for Yeast Selection

### Bead Sorting (Magnetic-Assisted Cell Sorting (MACS)) Methods

[0929] MACS and FACS selections were performed similarly to as described in Ackerman, et al. 2009 Biotechnol. Prog. 25(3), 774. Streptavidin magnetic beads (e.g., M-280 streptavidin beads from Thermo Fisher) were labeled with biotinylated antigen and incubated with yeast (typically 5-10× library diversity). Unbound yeast were removed, the beads were washed, and bound yeast were grown in selective media and induced for subsequent rounds of selection.

### Fluorescence-Activated Cell Sorting (FACS) Methods

[0930] Yeast were labeled with anti-c-Myc antibody to monitor expression and biotinylated antigen (concentration varied depending on the sorting round). In some experiments, the antigen was pre-mixed with streptavidin-Alexa Fluor® 647 in order to enhance the avidity of the interaction. In other experiments, the biotinylated antigen was detected after binding and washing with streptavidin-Alexa Fluor® 647. Singlet yeast with binding were sorted using a FACS Aria III cell sorter. The sorted yeast were grown in selective media then induced for subsequent selection rounds.

[0931] After an enriched yeast population was achieved, yeast were plated on SD-CAA agar plates and single colonies were grown and induced for expression, then labeled as described above to determine their propensity to bind to the target. Positive single clones were subsequently sequenced for binding antigen, after which some clones were expressed either as a soluble Fc fragment or as fused to Fab fragments.

### General Methods for Screening

### Screening by ELISA

[0932] Clones were selected from panning outputs and grown in individual wells of 96-well deep-well plates. The clones were either induced for periplasmic expression using autoinduction media (obtained from EMD Millipore) or infected with helper phage for phage-display of the individual Fc variants on phage. The cultures were grown overnight and spun to pellet E. coli. For phage ELISA, phage containing supernatant was used directly. For periplasmic expression, pellets were resuspended in 20% sucrose, followed by dilution at 4:1 with water, and shaken at 4° C. for 1 hour. Plates were spun to pellet the solids and supernatant was used in the ELISA.

[0933] ELISA plates were coated with antigen, typically at 0.5 mg/mL overnight, then blocked with 1% BSA before addition of phage or periplasmic extracts. After a 1-hour incubation and washing off unbound protein, HRP-conjugated secondary antibody was added (i.e., anti-Fc or anti-M13 for soluble Fc or phage-displayed Fc, respectively) and incubated for 30 minutes. The plates were washed again, and then developed with TMB reagent and quenched with 2N sulfuric acid. Absorbance at 450 nm was quantified using a plate reader (BioTek®) and binding curves were polotted using Prism software where applicable. Absorbance signal for tested clones was compared to negative control (phage or paraplasmic extract lacking Fc). In some assays, soluble transferrin or other competitor was added during the binding step, typically at significant molar excess (greater than 10-fold excess).

### Screening by Flow Cytometry

[0934] Fc variant polypeptides (expressed either on phage, in periplasmic extracts, or solubly as fusions to Fab fragments) were added to cells in 96-well V-bottom plates (about 100,000 cells per well in PBS+1% BSA (PBSA)), and incubated at 4° C. for 1 hour. The plates were subsequently spun and the media was removed, and then the cells were washed once with PBSA. The cells were resuspended in PBSA containing secondary antibody (typically goat anti-human-IgG-Alexa Fluor® 647 (obtained from Thermo Fisher)). After 30 minutes, the plates were spun and the media was removed, the cells were washed 1-2 times with PBSA, and then the plates were read on a flow cytometer (i.e., a FACSCanto™ II flow cytometer). Median fluorescence values were calculated for each condition using FlowJo software and binding curves were plotted with Prism software.

[0935] The amino acid substitutions for each clone described in the Tables (e.g., Table 14) dictate the amino acid substitutions at the register positions of that clone over the amino acids found in the sequence set forth in the Sequence Listing, in case of discrepancy.

[0936] It is understood that the examples and embodiments described herein are for illustrative purposes only and that various modifications or changes in light thereof will be suggested to persons skilled in the art and are to be included within the spirit and purview of this application and scope of the appended claims.

TABLE 12
EPITOPE MAPPING FOR CLONES 1C7, 1A1, 1A5, 1D10, AND 1G7

| | SEQ ID | | 1C7 | 1A1 | 1A5 | 1D10 | 1G7 | 17G2.A1 |
|---|---|---|---|---|---|---|---|---|
| Name | NO: | ID | binding | binding | binding | binding | binding | binding |
| Peptide_012 | 57 | SEEPGSETSDAKSTP | No | No | No | No | No | No |
| Peptide_011 | 58 | PTEDGSEEPGSETSD | No | No | No | No | No | No |
| Peptide_010 | 59 | SPLQTPTEDGSEEPG | No | No | No | No | No | No |
| Peptide_009 | 60 | AGLKESPLQTPTEDG | No | No | No | No | No | No |
| Peptide_008 | 61 | EGDTDAGLKESPLQT | No | No | No | No | No | No |
| Peptide_007 | 62 | MHQDQEGDTDAGLKE | No | No | No | No | No | No |
| Peptide_006 | 63 | QGGYTMHQDQEGDTD | No | No | No | No | No | No |
| Peptide_005 | 64 | GDRKDQGGYTMHQDQ | No | No | No | No | No | No |
| Peptide_004 | 65 | GTYGLGDRKDQGGYT | No | No | No | No | No | No |
| Peptide_003 | 66 | MEDHAGTYGLGDRKD | No | No | No | No | No | No |
| Peptide_002 | 67 | QEFEVMEDHAGTYGL | No | No | No | No | No | No |
| Peptide_001 | 68 | MAEPRQEFEVMEDHA | No | No | No | No | No | No |
| Peptide_024 | 69 | DEAAGHVTQARMVSK | No | No | No | No | No | No |
| Peptide_023 | 70 | TPSLEDEAAGHVTQA | Yes | No | No | No | No | No |
| Peptide_022 | 71 | AGIGDTPSLEDEAAG | No | No | No | No | No | No |
| Peptide_021 | 72 | TTAEEAGIGDTPSLE | No | No | No | No | No | No |
| Peptide_020 | 73 | EIPEGTTAEEAGIGD | No | No | No | No | No | No |
| Peptide_019 | 74 | AQPHTEIPEGTTAEE | No | No | No | No | No | No |
| Peptide_018 | 75 | GKQAAAQPHTEIPEG | No | No | No | No | No | No |
| Peptide_017 | 76 | DEGAPGKQAAAQPHT | No | No | No | No | No | No |
| Peptide_016 | 77 | TAPLVDEGAPGKQAA | No | No | No | No | No | No |
| Peptide_015 | 78 | TAEDVTAPLVDEGAP | No | No | No | No | No | No |
| Peptide_014 | 79 | AKSTPTAEDVTAPLV | No | No | No | No | No | No |
| Peptide_013 | 80 | SETSDAKSTPTAEDV | No | No | No | No | No | No |
| Peptide_036 | 81 | PPAPKTPPSSGEPPK | No | No | No | No | No | No |
| Peptide_035 | 82 | IPAKTPPAPKTPPSS | No | No | No | No | No | No |
| Peptide_034 | 83 | ANATRIPAKTPPAPK | No | No | No | No | No | No |
| Peptide_033 | 84 | GQKGQANATRIPAKT | No | No | No | No | No | No |
| Peptide_032 | 85 | GAAPPGQKGQANATR | No | No | No | No | No | No |
| Peptide_031 | 86 | IATPRGAAPPGQKGQ | No | No | No | No | No | No |
| Peptide_030 | 87 | DGKTKIATPRGAAPP | No | No | No | No | No | No |
| Peptide_029 | 88 | KAKGADGKTKIATPR | No | No | No | No | No | No |
| Peptide_028 | 89 | GSDDKKAKGADGKTK | No | No | No | No | No | No |
| Peptide_027 | 90 | SKDGTGSDDKKAKGA | No | No | No | No | No | No |
| Peptide_026 | 91 | RMVSKSKDGTGSDDK | No | No | No | No | No | No |
| Peptide_025 | 92 | HVTQARMVSKSKDGT | No | No | No | No | No | No |
| process- | 93 | GGSGGGSDYKDDDDK | No | No | No | No | No | No |
| control | | | | | | | | |
| Peptide_047 | 94 | TPPKSPSSAKSRLQT | No | No | No | No | No | No |
| Peptide_046 | 95 | VAVVRTPPKSPSSAK | No | No | No | No | No | No |
| Peptide_045 | 96 | REPKKVAVVRTPPKS | No | No | No | No | No | No |
| Peptide_044 | 97 | PTPPTREPKKVAVVR | No | No | No | No | No | No |
| Peptide_043 | 98 | RTPSLPTPPTREPKK | No | No | No | No | No | No |
| Peptide_042 | 99 | PGSRSRTPSLPTPPT | No | No | No | No | No | No |
| Peptide_041 | 100 | GSPGTPGSRSRTPSL | No | No | No | No | No | No |
| Peptide_040 | 101 | GYSSPGSPGTPGSRS | No | No | No | No | No | No |
| Peptide_039 | 102 | SGDRSGYSSPGSPGT | No | No | No | No | No | Yes |
| Peptide_038 | 103 | GEPPKSGDRSGYSSP | No | No | No | No | No | Yes |
| Peptide_037 | 104 | TPPSSGEPPKSGDRS | No | No | No | No | No | No |
| Peptide_059 | 105 | CGSKDNIKHVPGGGS | No | No | No | No | No | No |
| Peptide_058 | 106 | NVQSKCGSKDNIKHV | No | No | No | No | No | No |
| Peptide_057 | 107 | KLDLSNVQSKCGSKD | No | No | No | No | No | No |
| Peptide_056 | 108 | QIINKKLDLSNVQSK | No | No | No | No | No | No |
| Peptide_055 | 109 | GGGKVQIINKKLDLS | No | No | No | No | No | No |
| Peptide_054 | 110 | LKHQPGGGKVQIINK | No | No | No | No | No | No |
| Peptide_053 | 111 | GSTENLKHQPGGGKV | No | No | No | No | No | No |
| Peptide_052 | 112 | VKSKIGSTENLKHQP | No | Yes | Yes | Yes | Yes | No |
| Peptide_051 | 113 | PDLKNVKSKIGSTEN | No | Yes | Yes | Yes | Yes | No |
| Peptide_050 | 114 | APVPMPDLKNVKSKI | No | No | No | No | No | No |
| Peptide_049 | 115 | SRLQTAPVPMPDLKN | No | No | No | No | No | No |
| Peptide_048 | 116 | PSSAKSRLQTAPVPM | No | No | No | No | No | No |
| blank-control | | AA | No | No | No | No | No | No |
| Peptide_070 | 117 | FKDRVQSKIGSLDNI | No | Yes | Yes | Yes | Yes | No |
| Peptide_069 | 118 | SEKLDFKDRVQSKIG | No | No | No | No | No | No |
| Peptide_068 | 119 | QVEVKSEKLDFKDRV | No | No | No | No | No | No |
| Peptide_067 | 120 | KPGGGQVEVKSEKLD | No | No | No | No | No | No |
| Peptide_066 | 121 | GNIHHKPGGGQVEVK | No | No | No | No | No | No |
| Peptide_065 | 122 | KCGSLGNIHHKPGGG | No | No | No | No | No | No |
| Peptide_064 | 123 | SKVTSKCGSLGNIHH | No | No | No | No | No | No |
| Peptide_063 | 124 | KPVDLSKVTSKCGSL | No | No | No | No | No | No |
| Peptide_062 | 125 | VQIVYKPVDLSKVTS | No | No | No | No | No | No |
| Peptide_061 | 126 | PGGGSVQIVYKPVDL | No | No | No | No | No | No |
| Peptide_060 | 127 | NIKHVPGGGSVQIVY | No | No | No | No | No | No |
| Peptide_082 | 128 | RHLSNVSSTGSIDMV | No | No | No | No | No | No |
| Peptide_081 | 129 | GDTSPRHLSNVSSTG | No | No | No | No | No | No |
| Peptide_080 | 130 | SPVVSGDTSPRHLSN | No | No | No | No | No | No |
| Peptide_079 | 131 | EIVYKSPVVSGDTSP | No | No | No | No | No | No |
| Peptide_078 | 132 | TDHGAEIVYKSPVVS | No | No | No | No | No | No |
| Peptide_077 | 133 | NAKAKTDHGAEIVYK | No | No | No | No | No | No |
| Peptide_076 | 134 | LTFRENAKAKTDHGA | No | No | No | No | No | No |
| Peptide_075 | 135 | IETHKLTFRENAKAK | No | No | No | No | No | No |
| Peptide_074 | 136 | GGNKKIETHKLTFRE | No | No | No | No | No | No |
| Peptide_073 | 137 | THVPGGGNKKIETHK | No | No | No | No | No | No |
| Peptide_072 | 138 | SLDNITHVPGGGNKK | No | No | No | No | No | No |
| Peptide_071 | 139 | QSKIGSLDNITHVPG | No | No | No | No | No | No |
| Peptide_087 | 140 | TLADEVSASLAKQGL | No | No | No | No | No | No |
| Peptide_086 | 141 | ATLADEVSASLAKQG | No | No | No | No | No | No |
| Peptide_085 | 142 | DSPQLATLADEVSAS | No | No | No | No | No | No |
| Peptide_084 | 143 | SIDMVDSPQLATLAD | No | No | No | No | No | No |
| Peptide_083 | 144 | VSSTGSIDMVDSPQL | No | No | No | No | No | No |

TABLE 13
CH3 DOMAIN MODIFICATIONS

| Clone | | | | | | | | | | | | | | | | | | | |
|---|---|---|---|---|---|---|---|---|---|---|---|---|---|---|---|---|---|---|---|
| name | Group | 384 | 385 | 386 | 387 | 388 | 389 | 390 | 391 | . . . | 413 | 414 | 415 | 416 | 417 | 418 | 419 | 420 | 421 |
| Wild-type | n/a | N | G | Q | P | E | N | N | Y | . . . | D | K | S | R | W | Q | Q | G | N |
| 1 | | L | G | L | V | W | V | G | Y | . . . | A | K | S | T | W | Q | Q | G | W |
| 2 | | Y | G | T | V | W | S | H | Y | . . . | S | K | S | E | W | Q | Q | G | Y |
| 3 | | Y | G | T | E | W | S | Q | Y | . . . | E | K | S | D | W | Q | Q | G | H |
| 4 | | V | G | T | P | W | A | L | Y | . . . | L | K | S | E | W | Q | Q | G | W |
| 17 | 2 | Y | G | T | V | W | S | K | Y | . . . | S | K | S | E | W | Q | Q | G | F |
| 18 | 1 | L | G | H | V | W | A | V | Y | . . . | P | K | S | T | W | Q | Q | G | W |
| 21 | 1 | L | G | L | V | W | V | G | Y | . . . | P | K | S | T | W | Q | Q | G | W |
| 25 | 1 | M | G | H | V | W | V | G | Y | . . . | D | K | S | T | W | Q | Q | G | W |
| 34 | 1 | L | G | L | V | W | V | F | S | . . . | P | K | S | T | W | Q | Q | G | W |
| 35 | 2 | Y | G | T | E | W | S | S | Y | . . . | T | K | S | E | W | Q | Q | G | F |
| 44 | 2 | Y | G | T | E | W | S | N | Y | . . . | S | K | S | E | W | Q | Q | G | F |
| 51 | 1/2 | L | G | H | V | W | V | G | Y | . . . | S | K | S | E | W | Q | Q | G | W |
| 3.1-3 | 1 | L | G | H | V | W | V | A | T | . . . | P | K | S | T | W | Q | Q | G | W |
| 3.1-9 | 1 | L | G | P | V | W | V | H | T | . . . | P | K | S | T | W | Q | Q | G | W |
| 3.2-5 | 1 | L | G | H | V | W | V | D | Q | . . . | P | K | S | T | W | Q | Q | G | W |
| 3.2-19 | 1 | L | G | H | V | W | V | N | Q | . . . | P | K | S | T | W | Q | Q | G | W |
| 3.2-1 | 1 | L | G | H | V | W | V | N | F | . . . | P | K | S | T | W | Q | Q | G | W |

TABLE 14
ADDITIONAL CH3 DOMAIN MODIFICATIONS.

| Clone name | 378 | 379 | 380 | 381 | 382 | 383 | 384 | 385 | 386 | 387 | 388 | 389 | 390 | 391 | 39.2 | 411 | 412 | 413 | 414 | 415 | 416 | 417 | 418 | 419 | 420 | 421 | 422 | 423 |
|---|---|---|---|---|---|---|---|---|---|---|---|---|---|---|---|---|---|---|---|---|---|---|---|---|---|---|---|---|
| Wild-type | A | V | E | W | E | S | N | G | Q | P | E | N | N | Y | K | T | V | D | K | S | R | W | Q | Q | G | N | V | F |
| 35.20.1 | . | . | . | . | . | . | F | . | T | E | W | S | S | . | . | . | . | T | . | E | E | . | . | . | . | F | . | . |
| 35.20.2 | . | . | . | . | . | . | Y | . | T | E | W | A | S | . | . | . | . | T | . | E | E | . | . | . | . | F | . | . |
| 35.20.3 | . | . | . | . | . | . | Y | . | T | E | W | V | S | . | . | . | . | T | . | E | E | . | . | . | . | F | . | . |
| 35.20.4 | . | . | . | . | . | . | Y | . | T | E | W | S | S | . | . | . | . | S | . | E | E | . | . | . | . | F | . | . |
| 35.20.5 | . | . | . | . | . | . | F | . | T | E | W | A | S | . | . | . | . | T | . | E | E | . | . | . | . | F | . | . |
| 35.20.6 | . | . | . | . | . | . | F | . | T | E | W | V | S | . | . | . | . | T | . | E | E | . | . | . | . | F | . | . |
| 35.21.a.1 | . | . | W | . | . | . | F | . | T | E | W | S | S | . | . | . | . | T | . | E | E | . | . | . | . | F | . | . |
| 35.21.a.2 | . | . | W | . | . | . | Y | . | T | E | W | A | S | . | . | . | . | T | . | E | E | . | . | . | . | F | . | . |
| 35.21.a.3 | . | . | W | . | . | . | Y | . | T | E | W | V | S | . | . | . | . | T | . | E | E | . | . | . | . | F | . | . |
| 35.21.a.4 | . | . | W | . | . | . | Y | . | T | E | W | S | S | . | . | . | . | S | . | E | E | . | . | . | . | F | . | . |
| 35.21.a.5 | . | . | W | . | . | . | F | . | T | E | W | A | S | . | . | . | . | T | . | E | E | . | . | . | . | F | . | . |
| 35.21.a.6 | . | . | W | . | . | . | F | . | T | E | W | V | S | . | . | . | . | T | . | E | E | . | . | . | . | F | . | . |
| 35.23.1 | . | . | . | . | . | . | F | . | T | E | W | S | . | . | . | . | . | T | . | E | E | . | . | . | . | F | . | . |
| 35.23.2 | . | . | . | . | . | . | Y | . | T | E | W | A | . | . | . | . | . | T | . | E | E | . | . | . | . | F | . | . |
| 35.23.3 | . | . | . | . | . | . | Y | . | T | E | W | V | . | . | . | . | . | T | . | E | E | . | . | . | . | F | . | . |
| 35.23.4 | . | . | . | . | . | . | Y | . | T | E | W | S | . | . | . | . | . | S | . | E | E | . | . | . | . | F | . | . |
| 35.23.5 | . | . | . | . | . | . | F | . | T | E | W | A | . | . | . | . | . | T | . | E | E | . | . | . | . | F | . | . |
| 35.23.6 | . | . | . | . | . | . | F | . | T | E | W | V | . | . | . | . | . | T | . | E | E | . | . | . | . | F | . | . |
| 35.24.1 | . | . | W | . | . | . | F | . | T | E | W | S | . | . | . | . | . | T | . | E | E | . | . | . | . | F | . | . |
| 35.24.2 | . | . | W | . | . | . | Y | . | T | E | W | A | . | . | . | . | . | T | . | E | E | . | . | . | . | F | . | . |
| 35.24.3 | . | . | W | . | . | . | Y | . | T | E | W | V | . | . | . | . | . | T | . | E | E | . | . | . | . | F | . | . |
| 35.24.4 | . | . | W | . | . | . | Y | . | T | E | W | S | . | . | . | . | . | S | . | E | E | . | . | . | . | F | . | . |
| 35.24.5 | . | . | W | . | . | . | F | . | T | E | W | A | . | . | . | . | . | T | . | E | E | . | . | . | . | F | . | . |
| 35.24.6 | . | . | W | . | . | . | F | . | T | E | W | V | . | . | . | . | . | T | . | E | E | . | . | . | . | F | . | . |
| 35.21.17.1 | . | . | L | . | . | . | F | . | T | E | W | S | S | . | . | . | . | T | . | E | E | . | . | . | . | F | . | . |
| 35.21.17.2 | . | . | L | . | . | . | Y | . | T | E | W | A | S | . | . | . | . | T | . | E | E | . | . | . | . | F | . | . |
| 35.21.17.3 | . | . | L | . | . | . | Y | . | T | E | W | V | S | . | . | . | . | T | . | E | E | . | . | . | . | F | . | . |
| 35.21.17.4 | . | . | L | . | . | . | Y | . | T | E | W | S | S | . | . | . | . | S | . | E | E | . | . | . | . | F | . | . |
| 35.21.17.5 | . | . | L | . | . | . | F | . | T | E | W | A | S | . | . | . | . | T | . | E | E | . | . | . | . | F | . | . |
| 35.21.17.6 | . | . | L | . | . | . | F | . | T | E | W | V | S | . | . | . | . | T | . | E | E | . | . | . | . | F | . | . |
| 35.20 | . | . | . | . | . | . | Y | . | T | E | W | S | S | . | . | . | . | T | . | E | E | . | . | . | . | F | . | . |
| 35.21 | . | . | W | . | . | . | Y | . | T | E | W | S | S | . | . | . | . | T | . | E | E | . | . | . | . | F | . | . |
| 35.22 | . | . | W | . | . | . | Y | . | T | E | W | S | . | . | . | . | . | T | . | . | E | . | . | . | . | F | . | . |
| 35.23 | . | . | . | . | . | . | Y | . | T | E | W | S | . | . | . | . | . | T | . | E | E | . | . | . | . | F | . | . |
| 35.24 | . | . | W | . | . | . | Y | . | T | E | W | S | . | . | . | . | . | T | . | E | E | . | . | . | . | F | . | . |
| 35.21.17 | . | . | L | . | . | . | Y | . | T | E | W | S | S | . | . | . | . | T | . | E | E | . | . | . | . | F | . | . |
| 35.N390 | . | . | . | . | . | . | Y | . | T | E | W | S | . | . | . | . | . | T | . | . | E | . | . | . | . | F | . | . |
| 35.20.1.1 | | | | | | | F | . | T | E | W | S | S | | | | | S | | E | E | | | | | F | | |
| 35.23.2.1 | | | | | | | Y | | T | E | W | A | | | | | | S | | | E | | | | | F | | |
| 35.23.1.1 | | | | | | | F | | T | E | W | S | | | | | | S | | E | E | | | | | F | | |
| 35.S413 | | | | | | | Y | | T | E | W | S | S | | | | | S | | | E | | | | | F | | |
| 35.23.3.1 | | | | | | | Y | | T | E | W | V | | | | | | S | | E | E | | | | | F | | |
| 35.N390.1 | | | | | | | Y | | T | E | W | S | | | | | | S | | | E | | | | | F | | |
| 35.23.6.1 | | | | | | | F | | T | E | W | V | | | | | | S | | E | E | | | | | F | | |

INFORMAL SEQUENCE LISTING

| SEQ | | |
|---|---|---|
| ID | | |
| NO | Sequence | Description |
| 1 | MAEPRQEFEVMEDHAGTYGLGDRKDQGGYTMHQDQEGDTDAGLKESP | full-1ength |
| | LQTPTEDGSEEPGSETSDAKSTPTAEDVTAPLVDEGAPGKQAAAQPHTEIP | human Tau |
| | EGTTAEEAGIGDTPSLEDEAAGHVTQARMVSKSKDGTGSDDKKAKGAD | (Tau441; |
| | GKTKIATPRGAAPPGQKGQANATRIPAKTPPAPKTPPSSGEPPKSGDRSGY | 2N4R) |
| | SSPGSPGTPGSRSRTPSLPTPPTREPKKVAVVRTPPKSPSSAKSRLQTAPVP | |
| | MPDLKNVKSKIGSTENLKHQPGGGKVQIINKKLDLSNVQSKCGSKDNIKH | |
| | VPGGGSVQIVYKPVDLSKVTSKCGSLGNIHHKPGGGQVEVKSEKLDFKD | |
| | RVQSKIGSLDNITHVPGGGNKKIETHKLTFRENAKAKTDHGAEIVYKSPV | |
| | VSGDTSPRHLSNVSSTGSIDMVDSPQLATLADEVSASLAKQGL | |
| 2 | MGHHHHHHSGEVKPEVKPETHINLKVSDGSSEIFFKIKKTTPLRRLMEAFA | His6-Smt3 |
| | KRQGKEMDSLRFLYDGIRIQADQTPEDLDMEDNDIIEAHREQIGGS | tag |
| 3 | MGHHHHHHSGEVKPEVKPETHINLKVSDGSSEIFFKIKKTTPLRRLMEAFA | Tau441 with |
| | KRQGKEMDSLRFLYDGIRIQADQTPEDLDMEDNDIIEAHREQIGGSMAEP | His6-Smt3 |
| | RQEFEVMEDHAGTYGLGDRKDQGGYTMHQDQEGDTDAGLKESPLQTPT | tag |
| | EDGSEEPGSETSDAKSTPTAEDVTAPLVDEGAPGKQAAAQPHTEIPEGTTA | |
| | EEAGIGDTPSLEDEAAGHVTQARMVSKSKDGTGSDDKKAKGADGKTKIA | |
| | TPRGAAPPGQKGQANATRIPAKTPPAPKTPPSSGEPPKSGDRSGYSSPGSP | |
| | GTPGSRSRTPSLPTPPTREPKKVAVVRTPPKSPSSAKSRLQTAPVPMPDLK | |
| | NVKSKIGSTENLKHQPGGGKVQIINKKLDLSNVQSKCGSKDNIKHVPGGG | |
| | SVQIVYKPVDLSKVTSKCGSLGNIHHKPGGGQVEVKSEKLDFKDRVQSKI | |
| | GSLDNITHVPGGGNKKIETHKLTFRENAKAKTDHGAEIVYKSPVVSGDTS | |
| | PRHLSNVSSTGSIDMVDSPQLATLADEVSASLAKQGL | |
| 4 | MAEPRQEFEVMEDHAGTYGLGDRKDQGGYTMHQDQEGDTDAGLKESP | Tau (1-421) |
| | LQTPTEDGSEEPGSETSDAKSTPTAEDVTAPLVDEGAPGKQAAAQPHTEIP | |
| | EGTTAEEAGIGDTPSLEDEAAGHVTQARMVSKSKDGTGSDDKKAKGAD | |
| | GKTKIATPRGAAPPGQKGQANATRIPAKTPPAPKTPPSSGEPPKSGDRSGY | |
| | SSPGSPGTPGSRSRTPSLPTPPTREPKKVAVVRTPPKSPSSAKSRLQTAPVP | |
| | MPDLKNVKSKIGSTENLKHQPGGGKVQIINKKLDLSNVQSKCGSKDNIKH | |
| | VPGGGSVQIVYKPVDLSKVTSKCGSLGNIHHKPGGGQVEVKSEKLDFKD | |
| | RVQSKIGSLDNITHVPGGGNKKIETHKLTFRENAKAKTDHGAEIVYKSPV | |
| | VSGDTSPRHLSNVSSTGSIDMVD | |
| 5 | TPTEDGSEEPGSETSDAKSTPTAEDVTAPLVDEGAPGKQAAAQPHTEIPEG | Tau (50-441) |
| | TTAEEAGIGDTPSLEDEAAGHVTQARMVSKSKDGTGSDDKKAKGADGK | |
| | TKIATPRGAAPPGQKGQANATRIPAKTPPAPKTPPSSGEPPKSGDRSGYSSP | |
| | GSPGTPGSRSRTPSLPTPPTREPKKVAVVRTPPKSPSSAKSRLQTAPVPMPD | |
| | LKNVKSKIGSTENLKHQPGGGKVQIINKKLDLSNVQSKCGSKDNIKHVPG | |
| | GGSVQIVYKPVDLSKVTSKCGSLGNIHHKPGGGQVEVKSEKLDFKDRVQ | |
| | SKIGSLDNITHVPGGGNKKIETHKLTFRENAKAKTDHGAEIVYKSPVVSG | |
| | DTSPRHLSNVSSTGSIDMVDSPQLATLADEVSASLAKQGL | |
| 6 | MADPRQEFDTMEDHAGDYTLLQDQEGDMDHGLKESPPQPPADDGAEEP | mouse Tau |
| | GSETSDAKSTPTAEDVTAPLVDERAPDKQAAAQPHTEIPEGITAEEAGIGD | |
| | TPNQEDQAAGHVTQARVASKDRTGNDEKKAKGADGKTGAKIATPRGAA | |
| | SPAQKGTSNATRIPAKTTPSPKTPPGSGEPPKSGERSGYSSPGSPGTPGSRS | |
| | RTPSLPTPPTREPKKVAVVRTPPKSPSASKSRLQTAPVPMPDLKNVRSKIG | |
| | STENLKHQPGGGKVQIINKKLDLSNVQSKCGSKDNIKHVPGGGSVQIVYK | |
| | PVDLSKVTSKCGSLGNIHHKPGGGQVEVKSEKLDFKDRVQSKIGSLDNIT | |
| | HVPGGGNKKIETHKLTFRENAKAKTDHGAEIVYKSPVVSGDTSPRHLSNV | |
| | SSTGSIDMVDSPQLATLADEVSASLAKQGL | |
| 7 | MAEPRQEFDVMEDHAGTYGLGDRKDQEGYTMLQDQEGDTDAGLKESPL | cynomolgus |
| | QTPAEDGSEELGSETSDAKSTPTAEDVTAPLVDERAPGEQAAAQPHMEIP | Tau |
| | EGTTAEEAGIGDTPSLEDEAAGHVTQARMVSKSKDGTGSDDKKAKGAD | |
| | GKTKIATPRGAAPPGQKGQANATRIPAKTPPAPKTPPSSGEPPKSGDRSGY | |
| | SSPGSPGTPGSRSRTPSLPTPPAREPKKVAVVRTPPKSPSSAKSRLQTAPVP | |
| | MPDLKNVKSKIGSTENLKHQPGGGKVQIINKKLDLSNVQSKCGSKDNIKH | |
| | VPGGGSVQIVYKPVDLSKVTSKCGSLGNIHHKPGGGQVEVKSEKLDFKD | |
| | RVQSKIGSLDNITHVPGGGNKKIETHKLTFRENAKAKTDHGAEIVYKSPV | |
| | VSGDTSPRHLSNVSSTGSIDMVDSPQLATLADEVSASLAKQGL | |
| 8 | EVQLQQSGAELVRPGASVRLSCTASGFNIKDSLMHWLKQRPEQGLEWIG | 1A1 VH |
| | WIDPEDGETKYAPKFQDKATITADTSSNTAYLQLSSLTSEDTAIYYCTRRD | |
| | WEGPWGQGTLVTVSA | |
| 9 | GFNIKDSLMH | 1A1 CDR-H1, |
| | | 1D10 |
| | | CDR-H1, 1G7 |
| | | CDR-H1 |
| 10 | WIDPEDGETKYAPKFQD | 1A1 CDR-H2, |
| | | 1A5 |
| | | CDR-H2, 1D10 |
| | | CDR-H2, 1G7 |
| | | CDR-H2 |
| 11 | TRRDWEGP | 1A1 CDR-H3 |
| 12 | DIVMTQTPLTLSVTIGQPASISCKSSQSLLYSDGKTYLNWLLQSPGQSPKLL | 1A1 VL |
| | IYLVSKLESGVPDRFSGSGSGTDFTLKISRVEAEDLGVYYCVQGTHFPFTF | |
| | GSGTKLEIKR | |
| 13 | KSSQSLLYSDGKTYLN | 1A1 CDR-L1, |
| | | 1A5 |
| | | CDR-L1, 1D10 |
| | | CDR-L1, 1G7 |
| | | CDR-L1 |
| 14 | LVSKLES | 1A1 CDR-L2, |
| | | 1A5 |
| | | CDR-L2, 1D10 |
| | | CDR-L2, 1G7 |
| | | CDR-L2 |
| 15 | VQGTHFPFT | 1A1 CDR-L3 |
| 16 | EVQLQQSGAELVRPGASVKLSCTASGFNIKDSLIHWVKQRPEQGLEWIGW | 1A5 VH |
| | IDPEDGETKYAPKFQDKATKTADTSSNTAYLQLSSLTSEDTAIYYCASGE | |
| | WDYWGQGTSVTVSS | |
| 17 | GFNIKDSLIH | 1A5 CDR-H1 |
| 18 | ASGEWDY | 1A5 CDR-H3 |
| 19 | DVVMTQTPLTLSVTIGQPASISCKSSQSLLYSDGKTYLNWLLQSPGQSPKL | 1A5 VL |
| | LIYLVSKLESGVPDRFSGSGSGTDFTLKISRVEAEDLGVYYCVQGTHFPYT | |
| | FGGGTKLELKR | |
| 20 | VQGTHFPYT | 1A5 CDR-L3, |
| | | 1D10 |
| | | CDR-L3, 1G7 |
| | | CDR-L3 |
| 21 | EVKLVESGGGLVKPGGSLKLSCAASGFTFSSYGMSWVRQTPEKRLEWVA | 1C7 VH |
| | SISGDGGSYIHYADSVKGRFTISRDSAKNTLYLQMSSLRSEDTALYYCARL | |
| | PYWGQGTLVTVSA | |
| 22 | GFTFSSYGMS | 1C7 CDR-H1, |
| | | 1H_G11 CDR-H1, |
| | | 1H_B12 CDR-H1 |
| 23 | SISGDGGSYIHYADSVK | 1C7 CDR-H2, |
| | | 1H_G11 CDR-H2, |
| | | 1H_B12 CDR-H2 |
| 24 | ARLPY | 1C7 CDR-H3, |
| | | 1H_G11 CDR-H3, |
| | | 1H_B12 CDR-H3 |
| 25 | DIVMTQSPSSLTVTAGEKVTMSCKSSQSLLNSGNQKNYLTWYQQKPGQP | 1C7 VL |
| | PKLLIYWASTRESGVPDRFTGSGSGTDFTLTISNVQSEDLAEYFCQQYNSY | |
| | PLTFGAGTKLELKR | |
| 26 | KSSQSLLNSGNQKNYLT | 1C7 CDR-L1 |
| 27 | WASTRES | 1C7 CDR-L2 |
| 28 | QQYNSYPLT | 1C7 CDR-L3 |
| 29 | EVQLQQSGAELVRPGASVKLSCTASGFNIKDSLMHWMKQRPEQGLEWIG | 1D10 VH |
| | WIDPEDGETKYAPKFQDKATLTADTSSNAAYLQLSSLTSEDTAIYYCVRG | |
| | DWDGGYWGQGTTLTVSS | |
| 30 | VRGDWDGGY | 1D10 CDR-H3 |
| 31 | DVVMTQTPLSLSVTIGQPASISCKSSQSLLYSDGKTYLNWLQQRPGQSPKL | 1D10 VL |
| | LIYLVSKLESGVPDRFSGSGSGTDFTLKISRVEAEDLGVYYCVQGTHFPYT | |
| | FGGGTKLELKR | |
| 32 | EVQLQQSGAEVVRPGASVKLSCTTSGFNIKDSLMHWLKQRPEQGLEWIG | 1G7 VH |
| | WIDPEDGETKYAPKFQDKATITADTSSNTAYLQLSSLTSGDTAIYYCARR | |
| | DWEGPWGQGTLVTVSA | |
| 33 | ARRDWEGP | 1G7 CDR-H3 |
| 34 | DIVMTQTPLTLSVTIGQPASISCKSSQSLLYSDGKTYLNWLLQSPGQSPKLL | 1G7 VL |
| | IYLVSKLESGVPDRFSGSGSGTDFTLKISRVEAEDLGVYYCVQGTHFPYTF | |
| | GGGTKLELKR | |
| 35 | TPSLEDEAAGHVTQA | 1C7 epitope |
| | | (111-125) |
| 36 | PDLKNVKSKIGSIENLKHQP | 1A1 epitope |
| | | (251-270) |
| 37 | VKSKIGSTENLKHQP | 1A1 epitope |
| | | (256-270) |
| 38 | FKDRVQSKIGSLDNI | 1A1 epitope |
| | | (346-360) |
| 39 | SKIGS | 1A1 epitope |
| 40 | EVKLVESGGGLVKPGGSLKLSCAASGFTFSSYGMSWVRQTPEKRLEWVA | 1H_G11 VH, |
| | SISGDGGSYIHYADSVKGRFTISRDSAKNTLYLQMSSLRSEDTALYYCARL | 1H_B12 VH |
| | PYWGQGTLVTVSA | |
| 41 | DIVMTQSQKFMSTSVGDRVSVTCKASQNVGTNVAWYQQKPGQSPKALIY | 1H_G11 VL |
| | SASYRYSGVPDRFTGSGSGTDFTLTISNVQSEDLAEYFCQQYNTYPLTFGA | |
| | GTKLELKR | |
| 42 | KASQNVGTNVA | 1H_G11 CDR-L1, |
| | | 1H_B12 CDR-L1 |
| 43 | SASYRYS | 1H_G11 CDR-L2, |
| | | 1H_B12 CDR-L2 |
| 44 | QQYNTYPLT | 1H_G11 CDR-L3 |
| 45 | DIVMTQSQKFISTSVGDRVSITCKASQNVGTNVAWYQQKPGQSPKALIYS | 1H_B12 VL |
| | ASYRYSGVPDRFTGSGSGTDFTLTISNVQSEDLADYFCQQYSSYPLTFGAG | |
| | TKLEIKR | |
| 46 | QQYSSYPLT | 1H_B12 CDR-L3 |
| 47 | GFNIKDSLxH | 1A1-like CDR-H1 |
| | | consensus |
| 48 | xRRDWEGP | 1A1-like CDR-H3 |
| | | consensus |
| 49 | VQGTHFPxT | 1A1-like CDR-L3 |
| | | consensus |
| 50 | WASxRxS | 1C7-like CDR-L2 |
| | | consensus |
| 51 | QQYxxYPLT | 1C7-like CDR-L3 |
| | | consensus |
| 52 | MAEPRQEFEVMEDHAGTYGLGDRKDQGGYTMHQDQEGDTDAGLKAEE | human Tau |
| | AGIGDTPSLEDEAAGHVTQARMVSKSKDGTGSDDKKAKGADGKTKIATP | variant |
| | RGAAPPGQKGQANATRIPAKTPPAPKTPPSSGEPPKSGDRSGYSSPGSPGT | 352 (0N3R) |
| | PGSRSRTPSLPTPPTREPKKVAVVRTPPKSPSSAKSRLQTAPVPMPDLKNV | |
| | KSKIGSTENLKHQPGGGKVQIVYKPVDLSKVTSKCGSLGNIHHKPGGGQV | |
| | EVKSEKLDFKDRVQSKIGSLDNITHVPGGGNKKIETHKLTFRENAKAKTD | |
| | HGAEIVYKSPVVSGDTSPRHLSNVSSTGSIDMVDSPQLATLADEVSASLAK | |
| | QGL | |
| 53 | MAEPRQEFEVMEDHAGTYGLGDRKDQGGYTMHQDQEGDTDAGLKESP | human Tau |
| | LQTPTEDGSEEPGSETSDAKSTPTAEAEEAGIGDTPSLEDEAAGHVTQAR | variant |
| | MVSKSKDGTGSDDKKAKGADGKTKIATPRGAAPPGQKGQANATRIPAKT | 381 (1N3R) |
| | PPAPKTPPSSGEPPKSGDRSGYSSPGSPGTPGSRSRTPSLPTPPTREPKKVAV | |
| | VRTPPKSPSSAKSRLQTAPVPMPDLKNVKSKIGSTENLKHQPGGGKVQIV | |
| | YKPVDLSKVTSKCGSLGNIHHKPGGGQVEVKSEKLDFKDRVQSKIGSLDN | |
| | ITHVPGGGNKKIETHKLTFRENAKAKTDHGAEIVYKSPVVSGDTSPRHLS | |
| | NVSSTGSIDMVDSPQLATLADEVSASLAKQGL | |
| 54 | MAEPRQEFEVMEDHAGTYGLGDRKDQGGYTMHQDQEGDTDAGLKESP | human Tau |
| | LQTPTEDGSEEPGSETSDAKSTPTAEDVTAPLVDEGAPGKQAAAQPHTEIP | variant |
| | EGTTAEEAGIGDTPSLEDEAAGHVTQARMVSKSKDGTGSDDKKAKGAD | 410 (2N3R) |
| | GKTKIATPRGAAPPGQKGQANATRIPAKTPPAPKTPPSSGEPPKSGDRSGY | |
| | SSPGSPGTPGSRSRTPSLPTPPTREPKKVAVVRTPPKSPSSAKSRLQTAPVP | |
| | MPDLKNVKSKIGSTENLKHQPGGGKVQIVYKPVDLSKVTSKCGSLGNIHH | |
| | KPGGGQVEVKSEKLDFKDRVQSKIGSLDNITHVPGGGNKKIETHKLTFRE | |
| | NAKAKTDHGAEIVYKSPVVSGDTSPRHLSNVSSTGSIDMVDSPQLATLAD | |
| | EVSASLAKQGL | |
| 55 | MAEPRQEFEVMEDHAGTYGLGDRKDQGGYTMHQDQEGDTDAGLKAEE | human Tau |
| | AGIGDTPSLEDEAAGHVTQARMVSKSKDGTGSDDKKAKGADGKTKIATP | variant |
| | RGAAPPGQKGQANATRIPAKTPPAPKTPPSSGEPPKSGDRSGYSSPGSPGT | 383 (0N4R) |
| | PGSRSRTPSLPTPPTREPKKVAVVRTPPKSPSSAKSRLQTAPVPMPDLKNV | |
| | KSKIGSTENLKHQPGGGKVQIINKKLDLSNVQSKCGSKDNIKHVPGGGSV | |
| | QIVYKPVDLSKVTSKCGSLGNIHHKPGGGQVEVKSEKLDFKDRVQSKIGS | |
| | LDNITHVPGGGNKKIETHKLTFRENAKAKTDHGAEIVYKSPVVSGDTSPR | |
| | HLSNVSSTGSIDMVDSPQLATLADEVSASLAKQGL | |
| 56 | MAEPRQEFEVMEDHAGTYGLGDRKDQGGYTMHQDQEGDTDAGLKESP | human Tau |
| | LQTPTEDGSEEPGSETSDAKSTPTAEAEEAGIGDTPSLEDEAAGHVTQAR | variant |
| | MVSKSKDGTGSDDKKAKGADGKTKIATPRGAAPPGQKGQANATRIPAKT | 412 (1N4R) |
| | PPAPKTPPSSGEPPKSGDRSGYSSPGSPGTPGSRSRTPSLPTPPTREPKKVAV | |
| | VRTPPKSPSSAKSRLQTAPVPMPDLKNVKSKIGSTENLKHQPGGGKVQIIN | |
| | KKLDLSNVQSKCGSKDNIKHVPGGGSVQIVYKPVDLSKVTSKCGSLGNIH | |
| | HKPGGGQVEVKSEKLDFKDRVQSKIGSLDNITHVPGGGNKKIETHKLTFR | |
| | ENAKAKTDHGAEIVYKSPVVSGDTSPRHLSNVSSTGSIDMVDSPQLATLA | |
| | DEVSASLAKQGL | |
| 57- | See Table 13 below for sequences | Epitope mapping |
| 144 | | peptides |
| 145 | EVQLLESGGGLVQPGGSLRLSCAASGFTFSSYGMSWVRQAPGKGLEWVS | hu1C7.v1 VH |
| | SISGDGGSYIHYADSVKGRFTISRDNSKNTLYLQMNSLRAEDTAVYYCAR | |
| | LPYWGQGTLVTVSS | |
| 146 | EVQLLESGGGLVQPGGSLRLSCAASGFTFSSYGMSWVRQAPGKGLEWVA | hu1C7.v2 VH |
| | SISGDGGSYIHYADSVKGRFTISRDNSKNTLYLQMNSLRAEDTAVYYCAR | hu1C7.v2-1 VH |
| | LPYWGQGTLVTVSS | hu1C7.v2-2 VH |
| 147 | EVQLLESGGGLVQPGGSLRLSCAASGFTFSSYGMSWVRQAPGKGLEWVS | hu1C7.v3 VH |
| | SISGDGGSYIHYADSVKGRFTISRDNAKNTLYLQMNSLRAEDTAVYYCAR | |
| | LPYWGQGTLVTVSS | |
| 148 | EVQLLESGGGLVQPGGSLRLSCAASGFTFSSYGMSWVRQAPGKGLEWVA | hu1C7.v4 VH |
| | SISGDGGSYIHYADSVKGRFTISRDNAKNTLYLQMNSLRAEDTAVYYCAR | |
| | LPYWGQGTLVTVSS | |
| 22 | GFTFSSYGMS | hu1C7.v1 CDR-H1, |
| | | hu1C7.v2 CDR-H1, |
| | | hu1C7.v3 CDR-H1, |
| | | hu1C7.v4 CDR-H1, |
| | | hu1C7.v2-1 CDR-H1, |
| | | hu1C7.v2-2 CDR-H1 |
| 23 | SISGDGGSYIHYADSVK | hu1C7.v1 CDR-H2, |
| | | hu1C7.v2 CDR-H2, |
| | | hu1C7.v3 CDR-H2, |
| | | hu1C7.v4 CDR-H2, |
| | | hu1C7.v2-1 CDR-H2, |
| | | hu1C7.v2-2 CDR-H2 |
| 24 | ARLPY | hu1C7.v1 CDR-H3, |
| | | hu1C7.v2 CDR-H3, |
| | | hu1C7.v3 CDR-H3, |
| | | hu1C7.v4 CDR-H3, |
| | | hu1C7.v2-1 CDR-H3, |
| | | hu1C7.v2-2 CDR-H3 |
| 149 | DIVMTQSPDSLAVSLGERATINCKSSQSLLNSGNQKNYLTWYQQKPGQPP | hu1C7.v1 VL, |
| | KLLIYWASTRESGVPDRFSGSGSGTDFTLTISSLQAEDVAVYYCQQYNSYP | hu1C7.v2 VL, |
| | LTFGQGTKVEIKR | hu1C7.v3 VL, |
| | | hu1C7.v4 VL |
| 26 | KSSQSLLNSGNQKNYLT | hu1C7.v1 CDR-L1, |
| | | hu1C7.v2 CDR-L1, |
| | | hu1C7.v3 CDR-L1, |
| | | hu1C7.v4 CDR-L1 |
| 27 | WASTRES | hu1C7.v1 CDR-L2, |
| | | hu1C7.v2 CDR-L2, |
| | | hu1C7.v3 CDR-L2, |
| | | hu1C7.v4 CDR-L2 |
| | | hu1C7.v2-1 CDR-L2 |
| | | hu1C7.v2-2 CDR-L2 |
| 28 | QQYNSYPLT | hu1C7.v1 CDR-L3, |
| | | hu1C7.v2 CDR-L3, |
| | | hu1C7.v3 CDR-L3, |
| | | hu1C7.v4 CDR-L3 |
| 150 | GFKFSRVGVS | Affinity matured |
| | | variant hu1C7.v2 |
| | | CDR-H1_1 |
| 151 | GFTFSRVGTS | Affinity matured |
| | | variant hu1C7.v2 |
| | | CDR-H1_2 |
| 152 | GFRFSRVGMS | Affinity matured |
| | | variant hu1C7.v2 |
| | | CDR-H1_3 |
| 153 | GFRFSGPGMS | Affinity matured |
| | | variant hu1C7.v2 |
| | | CDR-H1_4 |
| 154 | VIKWRIYGMS | Affinity matured |
| | | variant hu1C7.v2 |
| | | CDR-H1_5 |
| 155 | AKLPF | Affinity matured |
| | | variant hu1C7.v2 |
| | | CDR-H3_1 |
| 156 | KSSHSLYSSRRHKHYLA | Affinity matured |
| | | variant hu1C7.v2 |
| | | CDR-L1_1 |
| 157 | KSSQSLLRSGKRQNYLV | Affinity matured |
| | | variant hu1C7.v2 |
| | | CDR-L1_2 |
| 158 | KSSQSLHRSGTQKDYLV | Affinity matured |
| | | variant hu1C7.v2 |
| | | CDR-L1_3 |
| 159 | QKYNSYPLT | Affinity matured |
| | | variant hu1C7.v2 |
| | | CDR-L3_1 |
| 160 | QKYDSYPLT | Affinity matured |
| | | variant hu1C7.v2 |
| | | CDR-L3_2 |
| 161 | QHYRTYPLT | Affinity matured |
| | | variant hu1C7.v2 |
| | | CDR-L3_3 |
| 162 | QHYRSYPMT | Affinity matured |
| | | variant hu1 C7.v2 |
| | | CDR-L3_4 |
| 163 | X₁X₂X₃X₄X₅X₆X₇GX₈S, wherein X₁ is G or V; X₂ is | hu1C7.v2-like CDR- |
| | F or I; X₃ is T, K, or R; X₄ is F or W; X₅ is S | H1 consensus_1 |
| | or R; X₆ is S, R, G, or I; X₇ is Y, V, or P; and | |
| | X₈ is M, V, or T | |
| 164 | AX₁LPX₂, wherein X₁ is R or K; and X₂ is Y or F | hu1C7.v2-like CDR- |
| | | H3 consensus_1 |
| 165 | KSSX₁SLX₂X₃SX₄X₅X₆X₇X₈YLX₉, wherein X₁ is Q or | hu1C7.v2-like CDR- |
| | H; X₂ is L, Y, or H; X₃ is N, S, or R; X₄ is G | L1 consensus_1 |
| | or R; X₅ is N, R, K, or T; X₆ is Q, H, or R; X₇ | |
| | is K or Q; X₈ is N, H, or D; and X₉ is N, T, V | |
| 166 | QX₁YX₂X₃YPX₄T, wherein X₁ is Q, K, or H; X₂ is | hu1C7.v2-like CDR- |
| | N, D, or R; X₃ is S or T; and X₄ is L or M | L3 consensus_1 |
| 167 | QVQLQQPGAELVGPGSSVKLSCKASGYTFINYWIDWMKQSPGQGLEWIG | 17G2.A1 VH |
| | NIYPSDSESHYNQKFTDKATLTVDISSSTAYLQLSSLTSEDSAVYYCALYS | |
| | KGYWGQGTSVTVSS | |
| 168 | GYTFINYWID | 17G2.A1 CDR-H1 |
| 169 | NIYPSDSESHYNQKFTD | 17G2.A1 CDR-H2 |
| 170 | ALYSKGY | 17G2.A1 CDR-H3 |
| 171 | DVLMTQTPLSLPVTLGDQASISCRSSQNIVHTNGNTYLEWYLQKPGQSPK | 17G2.A1 VL |
| | LLIYKLSSRFSGVPDRFSGSGSGTDFTLKISRVEAEDLGVYYCFQGSHLPFT | |
| | FGGGTKLEIKR | |
| 172 | RSSQNIVHTNGNTYLE | 17G2.A1 CDR-L1 |
| 173 | KLSSRFS | 17G2.A1 CDR-L2 |
| 174 | FQGSHLPFT | 17G2.A1 CDR-L3 |
| 175 | GXTFINXXID | 17G2.A1-like CDR- |
| | | H1 consensus |
| 176 | XSSXNIVHTXGNTYLE | 17G2.A1-like CDR- |
| | | L1 consensus |
| 177 | FXGSHLPXT | 17G2.A1-like CDR- |
| | | L3 consensus |
| 178 | GEPPKSGDRSGYSSPGSPGT | 17G2.A1 epitope |
| | | (186-205) |
| 179 | GEPPKSGDRSGYSSP | 17G2.A1 epitope |
| | | (186-200) |
| 180 | SGDRSGYSSPGSPGT | 17G2.A1 epitope |
| | | (191-205) |
| 181 | APELLGGPSVFLFPPKPKDTLMISRTPEVTCVVVDVSHEDPEVKFNWYVD | Wild-type human |
| | GVEVHNAKTKPREEQYNSTYRVVSVLTVLHQDWLNGKEYKCKVSNKAL | Fc sequence |
| | PAPIEKTISKAKGQPREPQVYTLPPSRDELTKNQVSLTCLVKGFYPSDIAVE | positions |
| | WESNGQPENNYKTTPPVLDSDGSFFLYSKLTVDKSRWQQGNVFSCSVMH | 231-447 EU |
| | EALHNHYTQKSLSLSPGK | index numbering |
| 182 | APELLGGPSVFLFPPKPKDTLMISRTPEVTCVVVDVSHEDPEVKFNWYVD | CH2 domain |
| | GVEVHNAKTKPREEQYNSTYRVVSVLTVLHQDWLNGKEYKCKVSNKAL | sequence |
| | PAPIEKTISKAK | positions |
| | | 231-340 EU |
| | | index numbering |
| 183 | GQPREPQVYTLPPSRDELTKNQVSLTCLVKGFYPSDIAVEWESNGQPENN | CH3 domain |
| | YKTTPPVLDSDGSFFLYSKLTVDKSRWQQGNVFSCSVMHEALHNHYTQK | sequence |
| | SLSLSPGK | Positions |
| | | 341-447 EU |
| | | index numbering |
| 184 | APELLGGPSVFLFPPKPKDTLMISRTPEVTCVVVDVSHEDPEVKFNWYVD | Clone CH3C.1 |
| | GVEVHNAKTKPREEQYNSTYRVVSVLTVLHQDWLNGKEYKCKVSNKAL | |
| | PAPIEKTISKAKGQPREPQVYTLPPSRDELTKNQVSLTCLVKGFYPSDIAVE | |
| | WESLGLVWVGYKTTPPVLDSDGSFFLYSKLTVAKSTWQQGWVFSCSVM | |
| | HEALHNHYTQKSLSLSPGK | |
| 185 | APELLGGPSVFLFPPKPKDTLMISRTPEVTCVVVDVSHEDPEVKFNWYVD | Clone CH3C.2 |
| | GVEVHNAKTKPREEQYNSTYRVVSVLTVLHQDWLNGKEYKCKVSNKAL | |
| | PAPIEKTISKAKGQPREPQVYTLPPSRDELTKNQVSLTCLVKGFYPSDIAVE | |
| | WESYGTVWSHYKTTPPVLDSDGSFFLYSKLTVSKSEWQQGYVFSCSVMH | |
| | EALHNHYTQKSLSLSPGK | |
| 186 | APELLGGPSVFLFPPKPKDTLMISRTPEVTCVVVDVSHEDPEVKFNWYVD | Clone CH3C.3 |
| | GVEVHNAKTKPREEQYNSTYRVVSVLTVLHQDWLNGKEYKCKVSNKAL | |
| | PAPIEKTISKAKGQPREPQVYTLPPSRDELTKNQVSLTCLVKGFYPSDIAVE | |
| | WESYGTEWSQYKTTPPVLDSDGSFFLYSKLTVEKSDWQQGHVFSCSVMH | |
| | EALHNHYTQKSLSLSPGK | |
| 187 | APELLGGPSVFLFPPKPKDTLMISRTPEVTCVVVDVSHEDPEVKFNWYVD | Clone CH3C.4 |
| | GVEVHNAKTKPREEQYNSTYRVVSVLTVLHQDWLNGKEYKCKVSNKAL | |
| | PAPIEKTISKAKGQPREPQVYTLPPSRDELTKNQVSLTCLVKGFYPSDIAVE | |
| | WESVGTPWALYKTTPPVLDSDGSFFLYSKLTVLKSEWQQGWVFSCSVMH | |
| | EALHNHYTQKSLSLSPGK | |
| 188 | APELLGGPSVFLFPPKPKDTLMISRTPEVTCVVVDVSHEDPEVKFNWYVD | Clone CH3C.17 |
| | GVEVHNAKTKPREEQYNSTYRVVSVLTVLHQDWLNGKEYKCKVSNKAL | |
| | PAPIEKTISKAKGQPREPQVYTLPPSRDELTKNQVSLTCLVKGFYPSDIAVE | |
| | WESYGTVWSKYKTTPPVLDSDGSFFLYSKLTVSKSEWQQGFVFSCSVMH | |
| | EALHNHYTQKSLSLSPGK | |
| 189 | APELLGGPSVFLFPPKPKDTLMISRTPEVTCVVVDVSHEDPEVKFNWYVD | Clone CH3C.18 |
| | GVEVHNAKTKPREEQYNSTYRVVSVLTVLHQDWLNGKEYKCKVSNKAL | |
| | PAPIEKTISKAKGQPREPQVYTLPPSRDELTKNQVSLTCLVKGFYPSDIAVE | |
| | WESLGHVWAVYKTTPPVLDSDGSFFLYSKLTVPKSTWQQGWVFSCSVM | |
| | HEALHNHYTQKSLSLSPGK | |
| 190 | APELLGGPSVFLFPPKPKDTLMISRTPEVTCVVVDVSHEDPEVKFNWYVD | Clone CH3C.21 |
| | GVEVHNAKTKPREEQYNSTYRVVSVLTVLHQDWLNGKEYKCKVSNKAL | |
| | PAPIEKTISKAKGQPREPQVYTLPPSRDELTKNQVSLTCLVKGFYPSDIAVE | |
| | WESLGLVWVGYKTTPPVLDSDGSFFLYSKLTVPKSTWQQGWVFSCSVM | |
| | HEALHNHYTQKSLSLSPGK | |
| 191 | APELLGGPSVFLFPPKPKDTLMISRTPEVTCVVVDVSHEDPEVKFNWYVD | Clone CH3C.25 |
| | GVEVHNAKTKPREEQYNSTYRVVSVLTVLHQDWLNGKEYKCKVSNKAL | |
| | PAPIEKTISKAKGQPREPQVYTLPPSRDELTKNQVSLTCLVKGFYPSDIAVE | |
| | WESMGHVWVGYKTTPPVLDSDGSFFLYSKLTVDKSTWQQGWVFSCSVM | |
| | HEALHNHYTQKSLSLSPGK | |
| 192 | APELLGGPSVFLFPPKPKDTLMISRTPEVTCVVVDVSHEDPEVKFNWYVD | Clone CH3C.34 |
| | GVEVHNAKTKPREEQYNSTYRVVSVLTVLHQDWLNGKEYKCKVSNKAL | |
| | PAPIEKTISKAKGQPREPQVYTLPPSRDELTKNQVSLTCLVKGFYPSDIAVE | |
| | WESLGLVWVFSKTTPPVLDSDGSFFLYSKLTVPKSTWQQGWVFSCSVMH | |
| | EALHNHYTQKSLSLSPGK | |
| 193 | APELLGGPSVFLFPPKPKDTLMISRTPEVTCVVVDVSHEDPEVKFNWYVD | Clone CH3C.35 |
| | GVEVHNAKTKPREEQYNSTYRVVSVLTVLHQDWLNGKEYKCKVSNKAL | |
| | PAPIEKTISKAKGQPREPQVYTLPPSRDELTKNQVSLTCLVKGFYPSDIAVE | |
| | WESYGTEWSSYKTTPPVLDSDGSFFLYSKLTVTKSEWQQGFVFSCSVMH | |
| | EALHNHYTQKSLSLSPGK | |
| 194 | APELLGGPSVFLFPPKPKDTLMISRTPEVTCVVVDVSHEDPEVKFNWYVD | Clone CH3C.44 |
| | GVEVHNAKTKPREEQYNSTYRVVSVLTVLHQDWLNGKEYKCKVSNKAL | |
| | PAPIEKTISKAKGQPREPQVYTLPPSRDELTKNQVSLTCLVKGFYPSDIAVE | |
| | WESYGTEWSNYKTTPPVLDSDGSFFLYSKLTVSKSEWQQGFVFSCSVMH | |
| | EALHNHYTQKSLSLSPGK | |
| 195 | APELLGGPSVFLFPPKPKDTLMISRTPEVTCVVVDVSHEDPEVKFNWYVD | Clone CH3C.51 |
| | GVEVHNAKTKPREEQYNSTYRVVSVLTVLHQDWLNGKEYKCKVSNKAL | |
| | PAPIEKTISKAKGQPREPQVYTLPPSRDELTKNQVSLTCLVKGFYPSDIAVE | |
| | WESLGHVVWGYKTTPPVLDSDGSFFLYSKLTVSKSEWQQGWVFSCSVM | |
| | HEALHNHYTQKSLSLSPGK | |
| 196 | APELLGGPSVFLFPPKPKDTLMISRTPEVTCVVVDVSHEDPEVKFNWYVD | Clone CH3C.3.1-3 |
| | GVEVHNAKTKPREEQYNSTYRVVSVLTVLHQDWLNGKEYKCKVSNKAL | |
| | PAPIEKTISKAKGQPREPQVYTLPPSRDELTKNQVSLTCLVKGFYPSDIAVE | |
| | WESLGHVWVATKTTPPVLDSDGSFFLYSKLTVPKSTWQQGWVFSCSVM | |
| | HEALHNHYTQKSLSLSPGK | |
| 197 | APELLGGPSVFLFPPKPKDTLMISRTPEVTCVVVDVSHEDPEVKFNWYVD | Clone CH3C.3.1-9 |
| | GVEVHNAKTKPREEQYNSTYRVVSVLTVLHQDWLNGKEYKCKVSNKAL | |
| | PAPIEKTISKAKGQPREPQVYTLPPSRDELTKNQVSLTCLVKGFYPSDIAVE | |
| | WESLGPVWVHTKTTPPVLDSDGSFFLYSKLTVPKSTWQQGWVFSCSVMH | |
| | EALHNHYTQKSLSLSPGK | |
| 198 | APELLGGPSVFLFPPKPKDTLMISRTPEVTCVVVDVSHEDPEVKFNWYVD | Clone CH3C.3.2-5 |
| | GVEVHNAKTKPREEQYNSTYRVVSVLTVLHQDWLNGKEYKCKVSNKAL | |
| | PAPIEKTISKAKGQPREPQVYTLPPSRDELTKNQVSLTCLVKGFYPSDIAVE | |
| | WESLGHVWVDQKTTPPVLDSDGSFFLYSKLTVPKSTWQQGWVFSCSVM | |
| | HEALHNHYTQKSLSLSPGK | |
| 199 | APELLGGPSVFLFPPKPKDTLMISRTPEVTCVVVDVSHEDPEVKFNWYVD | Clone CH3C.3.2-19 |
| | GVEVHNAKTKPREEQYNSTYRVVSVLTVLHQDWLNGKEYKCKVSNKAL | |
| | PAPIEKTISKAKGQPREPQVYTLPPSRDELTKNQVSLTCLVKGFYPSDIAVE | |
| | WESLGHVWVNQKTTPPVLDSDGSFFLYSKLTVPKSTWQQGWVFSCSVM | |
| | HEALHNHYTQKSLSLSPGK | |
| 200 | APELLGGPSVFLFPPKPKDTLMISRTPEVTCVVVDVSHEDPEVKFNWYVD | Clone CH3C.3.2-1 |
| | GVEVHNAKTKPREEQYNSTYRVVSVLTVLHQDWLNGKEYKCKVSNKAL | |
| | PAPIEKTISKAKGQPREPQVYTLPPSRDELTKNQVSLTCLVKGFYPSDIAVE | |
| | WESLGHVWVNFKTTPPVLDSDGSFFLYSKLTVPKSTWQQGWVFSCSVM | |
| | HEALHNHYTQKSLSLSPGK | |
| 201 | APELLGGPSVFLFPPKPKDTLMISRTPEVTCVVVDVSHEDPEVKFNWYVD | Clone CH3C.18 |
| | GVEVHNAKTKPREEQYNSTYRVVSVLTVLHQDWLNGKEYKCKVSNKAL | variant |
| | PAPIEKTISKAKGQPREPQVYTLPPSRDELTKNQVSLTCLVKGFYPSDIAV | |
| | WWESLGHVWAVYKTTPPVLDSDGSFFLYSKLTVPKSTWQQGWVFSCSV | |
| | MHEALHNHYTQKSLSLSPGK | |
| 202 | APELLGGPSVFLFPPKPKDTLMISRTPEVTCVVVDVSHEDPEVKFNWYVD | Clone CH3C.18 |
| | GVEVHNAKTKPREEQYNSTYRVVSVLTVLHQDWLNGKEYKCKVSNKAL | variant |
| | PAPIEKTISKAKGQPREPQVYTLPPSRDELTKNQVSLTCLVKGFYPSDIAVL | |
| | WESLGHVWAVYKTTPPVLDSDGSFFLYSKLTVPKSTWQQGWVFSCSVM | |
| | HEALHNHYTQKSLSLSPGK | |
| 203 | APELLGGPSVFLFPPKPKDTLMISRTPEVTCVVVDVSHEDPEVKFNWYVD | Clone CH3C.18 |
| | GVEVHNAKTKPREEQYNSTYRVVSVLTVLHQDWLNGKEYKCKVSNKAL | variant |
| | PAPIEKTISKAKGQPREPQVYTLPPSRDELTKNQVSLTCLVKGFYPSDIAVY | |
| | WESLGHVWAVYKTTPPVLDSDGSFFLYSKLTVPKSTWQQGWVFSCSVM | |
| | HEALHNHYTQKSLSLSPGK | |
| 204 | APELLGGPSVFLFPPKPKDTLMISRTPEVTCVVVDVSHEDPEVKFNWYVD | Clone CH3C.18 |
| | GVEVHNAKTKPREEQYNSTYRVVSVLTVLHQDWLNGKEYKCKVSNKAL | variant |
| | PAPIEKTISKAKGQPREPQVYTLPPSRDELTKNQVSLTCLVKGFYPSDIAVE | |
| | WESLGHVWAVYQTTPPVLDSDGSFFLYSKLTVPKSTWQQGWVFSCSVM | |
| | HEALHNHYTQKSLSLSPGK | |
| 205 | APELLGGPSVFLFPPKPKDTLMISRTPEVTCVVVDVSHEDPEVKFNWYVD | Clone CH3C.18 |
| | GVEVHNAKTKPREEQYNSTYRVVSVLTVLHQDWLNGKEYKCKVSNKAL | variant |
| | PAPIEKTISKAKGQPREPQVYTLPPSRDELTKNQVSLTCLVKGFYPSDIAVE | |
| | WESLGHVWAVYFTTPPVLDSDGSFFLYSKLTVPKSTWQQGWVFSCSVM | |
| | HEALHNHYTQKSLSLSPGK | |
| 206 | APELLGGPSVFLFPPKPKDTLMISRTPEVTCVVVDVSHEDPEVKFNWYVD | Clone CH3C.18 |
| | GVEVHNAKTKPREEQYNSTYRVVSVLTVLHQDWLNGKEYKCKVSNKAL | variant |
| | PAPIEKTISKAKGQPREPQVYTLPPSRDELTKNQVSLTCLVKGFYPSDIAVE | |
| | WESLGHVWAVYHTTPPVLDSDGSFFLYSKLTVPKSTWQQGWVFSCSVM | |
| | HEALHNHYTQKSLSLSPGK | |
| 207 | APELLGGPSVFLFPPKPKDTLMISRTPEVTCVVVDVSHEDPEVKFNWYVD | Clone CH3C.35.13 |
| | GVEVHNAKTKPREEQYNSTYRVVSVLTVLHQDWLNGKEYKCKVSNKAL | |
| | PAPIEKTISKAKGQPREPQVYTLPPSRDELTKNQVSLTCLVKGFYPSDIAV | |
| | WWESLGHVWAVYKTTPPVLDSDGSFFLYSKLTVPKSTWQQGWVFSCSV | |
| | MHEALHNHYTQKSLSLSPGK | |
| 208 | APELLGGPSVFLFPPKPKDTLMISRTPEVTCVVVDVSHEDPEVKFNWYVD | Clone CH3C.35.14 |
| | GVEVHNAKTKPREEQYNSTYRVVSVLTVLHQDWLNGKEYKCKVSNKAL | |
| | PAPIEKTISKAKGQPREPQVYTLPPSRDELTKNQVSLTCLVKGFYPSDIAVE | |
| | WESLGHVWAVYQTTPPVLDSDGSFFLYSKLTVPKSTWQQGWVFSCSVM | |
| | HEALHNHYTQKSLSLSPGK | |
| 209 | APELLGGPSVFLFPPKPKDTLMISRTPEVTCVVVDVSHEDPEVKFNWYVD | Clone CH3C.35.15 |
| | GVEVHNAKTKPREEQYNSTYRVVSVLTVLHQDWLNGKEYKCKVSNKAL | |
| | PAPIEKTISKAKGQPREPQVYTLPPSRDELTKNQVSLTCLVKGFYPSDIAV | |
| | WWESLGHVWAVYQTTPPVLDSDGSFFLYSKLTVPKSTWQQGWVFSCSV | |
| | MHEALHNHYTQKSLSLSPGK | |
| 210 | APELLGGPSVFLFPPKPKDTLMISRTPEVTCVVVDVSHEDPEVKFNWYVD | Clone CH3C.35.16 |
| | GVEVHNAKTKPREEQYNSTYRVVSVLTVLHQDWLNGKEYKCKVSNKAL | |
| | PAPIEKTISKAKGQPREPQVYTLPPSRDELTKNQVSLTCLVKGFYPSDIAV | |
| | WWESLGHVWVNQKTTPPVLDSDGSFFLYSKLTVPKSTWQQGWVFSCSV | |
| | MHEALHNHYTQKSLSLSPGK | |
| 211 | APELLGGPSVFLFPPKPKDTLMISRTPEVTCVVVDVSHEDPEVKFNWYVD | Clone CH3C.35.17 |
| | GVEVHNAKTKPREEQYNSTYRVVSVLTVLHQDWLNGKEYKCKVSNKAL | |
| | PAPIEKTISKAKGQPREPQVYTLPPSRDELTKNQVSLTCLVKGFYPSDIAVE | |
| | WESLGHVWVNQQTTPPVLDSDGSFFLYSKLTVPKSTWQQGWVFSCSVM | |
| | HEALHNHYTQKSLSLSPGK | |
| 212 | APELLGGPSVFLFPPKPKDTLMISRTPEVTCVVVDVSHEDPEVKFNWYVD | Clone CH3C.35.18 |
| | GVEVHNAKTKPREEQYNSTYRVVSVLTVLHQDWLNGKEYKCKVSNKAL | |
| | PAPIEKTISKAKGQPREPQVYTLPPSRDELTKNQVSLTCLVKGFYPSDIAV | |
| | WWESLGHVWVNQQTTPPVLDSDGSFFLYSKLTVPKSTWQQGWVFSCSV | |
| | MHEALHNHYTQKSLSLSPGK | |
| 213 | APELLGGPSVFLFPPKPKDTLMISRTPEVTCVVVDVSHEDPEVKFNWYVD | Clone CH3C.35.19 |
| | GVEVHNAKTKPREEQYNSTYRVVSVLTVLHQDWLNGKEYKCKVSNKAL | |
| | PAPIEKTISKAKGQPREPQVYTLPPSRDELTKNQVSLTCLVKGFYPSDIAV | |
| | WWESYGTEWSSYKTTPPVLDSDGSFFLYSKLTVTKSEWQQGFVFSCSVM | |
| | HEALHNHYTQKSLSLSPGK | |
| 214 | APELLGGPSVFLFPPKPKDTLMISRTPEVTCVVVDVSHEDPEVKFNWYVD | Clone CH3C.35.20 |
| | GVEVHNAKTKPREEQYNSTYRVVSVLTVLHQDWLNGKEYKCKVSNKAL | |
| | PAPIEKTISKAKGQPREPQVYTLPPSRDELTKNQVSLTCLVKGFYPSDIAVE | |
| | WESYGTEWSSYKTTPPVLDSDGSFFLYSKLTVTKEEWQQGFVFSCSVMH | |
| | EALHNHYTQKSLSLSPGK | |
| 215 | APELLGGPSVFLFPPKPKDTLMISRTPEVTCVVVDVSHEDPEVKFNWYVD | Clone CH3C.35.21 |
| | GVEVHNAKTKPREEQYNSTYRVVSVLTVLHQDWLNGKEYKCKVSNKAL | |
| | PAPIEKTISKAKGQPREPQVYTLPPSRDELTKNQVSLTCLVKGFYPSDIAV | |
| | WWESYGTEWSSYKTTPPVLDSDGSFFLYSKLTVTKEEWQQGFVFSCSVM | |
| | HEALHNHYTQKSLSLSPGK | |
| 216 | APELLGGPSVFLFPPKPKDTLMISRTPEVTCVVVDVSHEDPEVKFNWYVD | Clone CH3C.35.22 |
| | GVEVHNAKTKPREEQYNSTYRVVSVLTVLHQDWLNGKEYKCKVSNKAL | |
| | PAPIEKTISKAKGQPREPQVYTLPPSRDELTKNQVSLTCLVKGFYPSDIAV | |
| | WWESYGTEWSNYKTTPPVLDSDGSFFLYSKLTVTKSEWQQGFVFSCSVM | |
| | HEALHNHYTQKSLSLSPGK | |
| 217 | APELLGGPSVFLFPPKPKDTLMISRTPEVTCVVVDVSHEDPEVKFNWYVD | Clone CH3C.35.23 |
| | GVEVHNAKTKPREEQYNSTYRVVSVLTVLHQDWLNGKEYKCKVSNKAL | |
| | PAPIEKTISKAKGQPREPQVYTLPPSRDELTKNQVSLTCLVKGFYPSDIAVE | |
| | WESYGTEWSNYKTTPPVLDSDGSFFLYSKLTVTKEEWQQGFVFSCSVMH | |
| | EALHNHYTQKSLSLSPGK | |
| 218 | APELLGGPSVFLFPPKPKDTLMISRTPEVTCVVVDVSHEDPEVKFNWYVD | Clone CH3C.35.24 |
| | GVEVHNAKTKPREEQYNSTYRVVSVLTVLHQDWLNGKEYKCKVSNKAL | |
| | PAPIEKTISKAKGQPREPQVYTLPPSRDELTKNQVSLTCLVKGFYPSDIAV | |
| | WWESYGTEWSNYKTTPPVLDSDGSFFLYSKLTVTKEEWQQGFVFSCSVM | |
| | HEALHNHYTQKSLSLSPGK | |
| 219 | APELLGGPSVFLFPPKPKDTLMISRTPEVTCVVVDVSHEDPEVKFNWYVD | Clone CH3C.35.N163 |
| | GVEVHNAKTKPREEQYNSTYRVVSVLTVLHQDWLNGKEYKCKVSNKAL | |
| | PAPIEKTISKAKGQPREPQVYTLPPSRDELTKNQVSLTCLVKGFYPSDIAVE | |
| | WESYGTEWSNYKTTPPVLDSDGSFFLYSKLTVTKSEWQQGFVFSCSVMH | |
| | EALHNHYTQKSLSLSPGK | |
| 220 | APELLGGPSVFLFPPKPKDTLMISRTPEVTCVVVDVSHEDPEVKFNWYVD | Clone |
| | GVEVHNAKTKPREEQYNSTYRVVSVLTVLHQDWLNGKEYKCKVSNKAL | CH3C.35.K165Q |
| | PAPIEKTISKAKGQPREPQVYTLPPSRDELTKNQVSLTCLVKGFYPSDIAVE | |
| | WESYGTEWSSYQTTPPVLDSDGSFFLYSKLTVTKSEWQQGFVFSCSVMH | |
| | EALHNHYTQKSLSLSPGK | |
| 221 | APELLGGPSVFLFPPKPKDTLMISRTPEVTCVVVDVSHEDPEVKFNWYVD | Clone |
| | GVEVHNAKTKPREEQYNSTYRVVSVLTVLHQDWLNGKEYKCKVSNKAL | CH3C.35.N163. |
| | PAPIEKTISKAKGQPREPQVYTLPPSRDELTKNQVSLTCLVKGFYPSDIAVE | K165Q |
| | WESYGTEWSNYQTTPPVLDSDGSFFLYSKLTVTKSEWQQGFVFSCSVMH | |
| | EALHNHYTQKSLSLSPGK | |
| 222 | APELLGGPSVFLFPPKPKDTLMISRTPEVTCVVVDVSHEDPEVKFNWYVD | Clone CH3C.35.21.1 |
| | GVEVHNAKTKPREEQYNSTYRVVSVLTVLHQDWLNGKEYKCKVSNKAL | |
| | PAPIEKTISKAKGQPREPQVYTLPPSRDELTKNQVSLTCLVKGFYPSDIAVL | |
| | WESYGTEWSSYKTTPPVLDSDGSFFLYSKLTVTKSEWQQGFVFSCSVMH | |
| | EALHNHYTQKSLSLSPGK | |
| 223 | APELLGGPSVFLFPPKPKDTLMISRTPEVTCVVVDVSHEDPEVKFNWYVD | Clone CH3C.35.21.2 |
| | GVEVHNAKTKPREEQYNSTYRVVSVLTVLHQDWLNGKEYKCKVSNKAL | |
| | PAPIEKTISKAKGQPREPQVYTLPPSRDELTKNQVSLTCLVKGFYPSDIAVL | |
| | WESYGTEWSSYRTTPPVLDSDGSFFLYSKLTVTKSEWQQGFVFSCSVMHE | |
| | ALHNHYTQKSLSLSPGK | |
| 224 | APELLGGPSVFLFPPKPKDTLMISRTPEVTCVVVDVSHEDPEVKFNWYVD | Clone CH3C.35.21.3 |
| | GVEVHNAKTKPREEQYNSTYRVVSVLTVLHQDWLNGKEYKCKVSNKAL | |
| | PAPIEKTISKAKGQPREPQVYTLPPSRDELTKNQVSLTCLVKGFYPSDIAVL | |
| | WESYGTEWSSYRTTPPVLDSDGSFFLYSKLTVTREEWQQGFVFSCSVMHE | |
| | ALHNHYTQKSLSLSPGK | |
| 225 | APELLGGPSVFLFPPKPKDTLMISRTPEVTCVVVDVSHEDPEVKFNWYVD | Clone CH3C.35.21.4 |
| | GVEVHNAKTKPREEQYNSTYRVVSVLTVLHQDWLNGKEYKCKVSNKAL | |
| | PAPIEKTISKAKGQPREPQVYTLPPSRDELTKNQVSLTCLVKGFYPSDIAVL | |
| | WESYGTEWSSYRTTPPVLDSDGSFFLYSKLTVTGEEWQQGFVFSCSVMH | |
| | EALHNHYTQKSLSLSPGK | |
| 226 | APELLGGPSVFLFPPKPKDTLMISRTPEVTCVVVDVSHEDPEVKFNWYVD | Clone CH3C.35.21.5 |
| | GVEVHNAKTKPREEQYNSTYRVVSVLTVLHQDWLNGKEYKCKVSNKAL | |
| | PAPIEKTISKAKGQPREPQVYTLPPSRDELTKNQVSLTCLVKGFYPSDIAVL | |
| | WESYGTEWSSYRTTPPVLDSDGSFFLYSKLTVTREEWQQGFVFSCWVMH | |
| | EALHNHYTQKSLSLSPGK | |
| 227 | APELLGGPSVFLFPPKPKDTLMISRTPEVTCVVVDVSHEDPEVKFNWYVD | Clone CH3C.35.21.6 |
| | GVEVHNAKTKPREEQYNSTYRVVSVLTVLHQDWLNGKEYKCKVSNKAL | |
| | PAPIEKTISKAKGQPREPQVYTLPPSRDELTKNQVSLTCLVKGFYPSDIAVL | |
| | WESYGTEWSSYRTTPPVLDSDGSFFLYSKLTVTKEEWQQGFVFSCWVMH | |
| | EALHNHYTQKSLSLSPGK | |
| 228 | APELLGGPSVFLFPPKPKDTLMISRTPEVTCVVVDVSHEDPEVKFNWYVD | Clone CH3C.35.21.7 |
| | GVEVHNAKTKPREEQYNSTYRVVSVLTVLHQDWLNGKEYKCKVSNKAL | |
| | PAPIEKTISKAKGQPREPQVYTLPPSRDELTKNQVSLTCLVKGFYPSDIAVL | |
| | WESYGTEWSSYRTTPPVLDSDGSFFLYSKLTVTREEWQQGFVFTCWVMH | |
| | EALHNHYTQKSLSLSPGK | |
| 229 | APELLGGPSVFLFPPKPKDTLMISRTPEVTCVVVDVSHEDPEVKFNWYVD | Clone CH3C.35.21.8 |
| | GVEVHNAKTKPREEQYNSTYRVVSVLTVLHQDWLNGKEYKCKVSNKAL | |
| | PAPIEKTISKAKGQPREPQVYTLPPSRDELTKNQVSLTCLVKGFYPSDIAVL | |
| | WESYGTEWSSYRTTPPVLDSDGSFFLYSKLTVTREEWQQGFVFTCGVMH | |
| | EALHNHYTQKSLSLSPGK | |
| 230 | APELLGGPSVFLFPPKPKDTLMISRTPEVTCVVVDVSHEDPEVKFNWYVD | Clone CH3C.35.21.9 |
| | GVEVHNAKTKPREEQYNSTYRVVSVLTVLHQDWLNGKEYKCKVSNKAL | |
| | PAPIEKTISKAKGQPREPQVYTLPPSRDELTKNQVSLTCLVKGFYPSDIAVL | |
| | WESYGTEWSSYRTTPPVLDSDGSFFLYSKLTVTREEWQQGFVFECWVMH | |
| | EALHNHYTQKSLSLSPGK | |
| 231 | APELLGGPSVFLFPPKPKDTLMISRTPEVTCVVVDVSHEDPEVKFNWYVD | Clone CH3C.35.21.10 |
| | GVEVHNAKTKPREEQYNSTYRVVSVLTVLHQDWLNGKEYKCKVSNKAL | |
| | PAPIEKTISKAKGQPREPQVYTLPPSRDELTKNQVSLTCLVKGFYPSDIAVL | |
| | WESYGTEWSSYRTTPPVLDSDGSFFLYSKLTVTREEWQQGFVFKCWVMH | |
| | EALHNHYTQKSLSLSPGK | |
| 232 | APELLGGPSVFLFPPKPKDTLMISRTPEVTCVVVDVSHEDPEVKFNWYVD | Clone CH3C.35.21.11 |
| | GVEVHNAKTKPREEQYNSTYRVVSVLTVLHQDWLNGKEYKCKVSNKAL | |
| | PAPIEKTISKAKGQPREPQVYTLPPSRDELTKNQVSLTCLVKGFYPSDIAVL | |
| | WESYGTEWSSYRTTPPVLDSDGSFFLYSKLTVTPEEWQQGFVFKCWVMH | |
| | EALHNHYTQKSLSLSPGK | |
| 233 | APELLGGPSVFLFPPKPKDTLMISRTPEVTCVVVDVSHEDPEVKFNWYVD | Clone CH3C.35.21.12 |
| | GVEVHNAKTKPREEQYNSTYRVVSVLTVLHQDWLNGKEYKCKVSNKAL | |
| | PAPIEKTISKAKGQPREPQVYTLPPSRDELTKNQVSLTCLVKGFYPSDIAV | |
| | WWESYGTEWSSYRTTPPVLDSDGSFFLYSKLTVTREEWQQGFVFSCSVM | |
| | HEALHNHYTQKSLSLSPGK | |
| 234 | APELLGGPSVFLFPPKPKDTLMISRTPEVTCVVVDVSHEDPEVKFNWYVD | Clone CH3C.35.21.13 |
| | GVEVHNAKTKPREEQYNSTYRVVSVLTVLHQDWLNGKEYKCKVSNKAL | |
| | PAPIEKTISKAKGQPREPQVYTLPPSRDELTKNQVSLTCLVKGFYPSDIAV | |
| | WWESYGTEWSSYRTTPPVLDSDGSFFLYSKLTVTGEEWQQGFVFSCSVM | |
| | HEALHNHYTQKSLSLSPGK | |
| 235 | APELLGGPSVFLFPPKPKDTLMISRTPEVTCVVVDVSHEDPEVKFNWYVD | Clone CH3C.35.21.14 |
| | GVEVHNAKTKPREEQYNSTYRVVSVLTVLHQDWLNGKEYKCKVSNKAL | |
| | PAPIEKTISKAKGQPREPQVYTLPPSRDELTKNQVSLTCLVKGFYPSDIAV | |
| | WWESYGTEWSSYRTTPPVLDSDGSFFLYSKLTVTREEWQQGFVFTCWV | |
| | MHEALHNHYTQKSLSLSPGK | |
| 236 | APELLGGPSVFLFPPKPKDTLMISRTPEVTCVVVDVSHEDPEVKFNWYVD | Clone CH3C.35.21.15 |
| | GVEVHNAKTKPREEQYNSTYRVVSVLTVLHQDWLNGKEYKCKVSNKAL | |
| | PAPIEKTISKAKGQPREPQVYTLPPSRDELTKNQVSLTCLVKGFYPSDIAV | |
| | WWESYGTEWSSYRTTPPVLDSDGSFFLYSKLTVTGEEWQQGFVFTCWV | |
| | MHEALHNHYTQKSLSLSPGK | |
| 237 | APELLGGPSVFLFPPKPKDTLMISRTPEVTCVVVDVSHEDPEVKFNWYVD | Clone CH3C.35.21.16 |
| | GVEVHNAKTKPREEQYNSTYRVVSVLTVLHQDWLNGKEYKCKVSNKAL | |
| | PAPIEKTISKAKGQPREPQVYTLPPSRDELTKNQVSLTCLVKGFYPSDIAV | |
| | WWESYGTEWSSYRTTPPVLDSDGSFFLYSKLTVTREEWQQGFVFTCGVM | |
| | HEALHNHYTQKSLSLSPGK | |
| 238 | APELLGGPSVFLFPPKPKDTLMISRTPEVTCVVVDVSHEDPEVKFNWYVD | Clone CH3C.35.21.17 |
| | GVEVHNAKTKPREEQYNSTYRVVSVLTVLHQDWLNGKEYKCKVSNKAL | |
| | PAPIEKTISKAKGQPREPQVYTLPPSRDELTKNQVSLTCLVKGFYPSDIAVL | |
| | WESYGTEWSSYKTTPPVLDSDGSFFLYSKLTVTKEEWQQGFVFSCSVMH | |
| | EALHNHYTQKSLSLSPGK | |
| 239 | APELLGGPSVFLFPPKPKDTLMISRTPEVTCVVVDVSHEDPEVKFNWYVD | Clone CH3C.35.21.18 |
| | GVEVHNAKTKPREEQYNSTYRVVSVLTVLHQDWLNGKEYKCKVSNKAL | |
| | PAPIEKTISKAKGQPREPQVYTLPPSRDELTKNQVSLTCLVKGFYPSDIAVL | |
| | WESYGTEWSSYRTTPPVLDSDGSFFLYSKLTVTKEEWQQGFVFSCSVMH | |
| | EALHNHYTQKSLSLSPGK | |
| 240 | APELLGGPSVFLFPPKPKDTLMISRTPEVTCVVVDVSHEDPEVKFNWYVD | Clone CH3C.35.20.1 |
| | GVEVHNAKTKPREEQYNSTYRVVSVLTVLHQDWLNGKEYKCKVSNKAL | |
| | PAPIEKTISKAKGQPREPQVYTLPPSRDELTKNQVSLTCLVKGFYPSDIAVE | |
| | WESFGTEWSSYKTTPPVLDSDGSFFLYSKLTVTKEEWQQGFVFSCSVMHE | |
| | ALHNHYTQKSLSLSPGK | |
| 241 | APELLGGPSVFLFPPKPKDTLMISRTPEVTCVVVDVSHEDPEVKFNWYVD | Clone CH3C.35.20.2 |
| | GVEVHNAKTKPREEQYNSTYRVVSVLTVLHQDWLNGKEYKCKVSNKAL | |
| | PAPIEKTISKAKGQPREPQVYTLPPSRDELTKNQVSLTCLVKGFYPSDIAVE | |
| | WESYGTEWASYKTTPPVLDSDGSFFLYSKLTVTKEEWQQGFVFSCSVMH | |
| | EALHNHYTQKSLSLSPGK | |
| 242 | APELLGGPSVFLFPPKPKDTLMISRTPEVTCVVVDVSHEDPEVKFNWYVD | Clone CH3C.35.20.3 |
| | GVEVHNAKTKPREEQYNSTYRVVSVLTVLHQDWLNGKEYKCKVSNKAL | |
| | PAPIEKTISKAKGQPREPQVYTLPPSRDELTKNQVSLTCLVKGFYPSDIAVE | |
| | WESYGTEWVSYKTTPPVLDSDGSFFLYSKLTVTKEEWQQGFVFSCSVMH | |
| | EALHNHYTQKSLSLSPGK | |
| 243 | APELLGGPSVFLFPPKPKDTLMISRTPEVTCVVVDVSHEDPEVKFNWYVD | Clone CH3C.35.20.4 |
| | GVEVHNAKTKPREEQYNSTYRVVSVLTVLHQDWLNGKEYKCKVSNKAL | |
| | PAPIEKTISKAKGQPREPQVYTLPPSRDELTKNQVSLTCLVKGFYPSDIAVE | |
| | WESYGTEWSSYKTTPPVLDSDGSFFLYSKLTVSKEEWQQGFVFSCSVMH | |
| | EALHNHYTQKSLSLSPGK | |
| 244 | APELLGGPSVFLFPPKPKDTLMISRTPEVTCVVVDVSHEDPEVKFNWYVD | Clone CH3C.35.20.5 |
| | GVEVHNAKTKPREEQYNSTYRVVSVLTVLHQDWLNGKEYKCKVSNKAL | |
| | PAPIEKTISKAKGQPREPQVYTLPPSRDELTKNQVSLTCLVKGFYPSDIAVE | |
| | WESFGTEWASYKTTPPVLDSDGSFFLYSKLTVTKEEWQQGFVFSCSVMH | |
| | EALHNHYTQKSLSLSPGK | |
| 245 | APELLGGPSVFLFPPKPKDTLMISRTPEVTCVVVDVSHEDPEVKFNWYVD | Clone CH3C.35.20.6 |
| | GVEVHNAKTKPREEQYNSTYRVVSVLTVLHQDWLNGKEYKCKVSNKAL | |
| | PAPIEKTISKAKGQPREPQVYTLPPSRDELTKNQVSLTCLVKGFYPSDIAVE | |
| | WESFGTEWVSYKTTPPVLDSDGSFFLYSKLTVTKEEWQQGFVFSCSVMH | |
| | EALHNHYTQKSLSLSPGK | |
| 246 | APELLGGPSVFLFPPKPKDTLMISRTPEVTCVVVDVSHEDPEVKFNWYVD | Clone |
| | GVEVHNAKTKPREEQYNSTYRVVSVLTVLHQDWLNGKEYKCKVSNKAL | CH3C.35.21.a.1 |
| | PAPIEKTISKAKGQPREPQVYTLPPSRDELTKNQVSLTCLVKGFYPSDIAV | |
| | WWESFGTEWSSYKTTPPVLDSDGSFFLYSKLTVTKEEWQQGFVFSCSVM | |
| | HEALHNHYTQKSLSLSPGK | |
| 247 | APELLGGPSVFLFPPKPKDTLMISRTPEVTCVVVDVSHEDPEVKFNWYVD | Clone |
| | GVEVHNAKTKPREEQYNSTYRVVSVLTVLHQDWLNGKEYKCKVSNKAL | CH3C.35.21.a.2 |
| | PAPIEKTISKAKGQPREPQVYTLPPSRDELTKNQVSLTCLVKGFYPSDIAV | |
| | WWESYGTEWASYKTTPPVLDSDGSFFLYSKLTVTKEEWQQGFVFSCSVM | |
| | HEALHNHYTQKSLSLSPGK | |
| 248 | APELLGGPSVFLFPPKPKDTLMISRTPEVTCVVVDVSHEDPEVKFNWYVD | Clone |
| | GVEVHNAKTKPREEQYNSTYRVVSVLTVLHQDWLNGKEYKCKVSNKAL | CH3C.35.21.a.3 |
| | PAPIEKTISKAKGQPREPQVYTLPPSRDELTKNQVSLTCLVKGFYPSDIAV | |
| | WWESYGTEWVSYKTTPPVLDSDGSFFLYSKLTVTKEEWQQGFVFSCSVM | |
| | HEALHNHYTQKSLSLSPGK | |
| 249 | APELLGGPSVFLFPPKPKDTLMISRTPEVTCVVVDVSHEDPEVKFNWYVD | Clone |
| | GVEVHNAKTKPREEQYNSTYRVVSVLTVLHQDWLNGKEYKCKVSNKAL | CH3C.35.21.a.4 |
| | PAPIEKTISKAKGQPREPQVYTLPPSRDELTKNQVSLTCLVKGFYPSDIAV | |
| | WWESYGTEWSSYKTTPPVLDSDGSFFLYSKLTVSKEEWQQGFVFSCSVM | |
| | HEALHNHYTQKSLSLSPGK | |
| 250 | APELLGGPSVFLFPPKPKDTLMISRTPEVTCVVVDVSHEDPEVKFNWYVD | Clone |
| | GVEVHNAKTKPREEQYNSTYRVVSVLTVLHQDWLNGKEYKCKVSNKAL | CH3C.35.21.a.5 |
| | PAPIEKTISKAKGQPREPQVYTLPPSRDELTKNQVSLTCLVKGFYPSDIAV | |
| | WWESFGTEWASYKTTPPVLDSDGSFFLYSKLTVTKEEWQQGFVFSCSVM | |
| | HEALHNHYTQKSLSLSPGK | |
| 251 | APELLGGPSVFLFPPKPKDTLMISRTPEVTCVVVDVSHEDPEVKFNWYVD | Clone |
| | GVEVHNAKTKPREEQYNSTYRVVSVLTVLHQDWLNGKEYKCKVSNKAL | CH3C.35.21.a.6 |
| | PAPIEKTISKAKGQPREPQVYTLPPSRDELTKNQVSLTCLVKGFYPSDIAV | |
| | WWESFGTEWVSYKTTPPVLDSDGSFFLYSKLTVTKEEWQQGFVFSCSVM | |
| | HEALHNHYTQKSLSLSPGK | |
| 252 | APELLGGPSVFLFPPKPKDTLMISRTPEVTCVVVDVSHEDPEVKFNWYVD | Clone |
| | GVEVHNAKTKPREEQYNSTYRVVSVLTVLHQDWLNGKEYKCKVSNKAL | CH3C.35.23.1 |
| | PAPIEKTISKAKGQPREPQVYTLPPSRDELTKNQVSLTCLVKGFYPSDIAVE | |
| | WESFGTEWSNYKTTPPVLDSDGSFFLYSKLTVTKEEWQQGFVFSCSVMH | |
| | EALHNHYTQKSLSLSPGK | |
| 253 | APELLGGPSVFLFPPKPKDTLMISRTPEVTCVVVDVSHEDPEVKFNWYVD | Clone |
| | GVEVHNAKTKPREEQYNSTYRVVSVLTVLHQDWLNGKEYKCKVSNKAL | CH3C.35.23.2 |
| | PAPIEKTISKAKGQPREPQVYTLPPSRDELTKNQVSLTCLVKGFYPSDIAVE | |
| | WESYGTEWANYKTTPPVLDSDGSFFLYSKLTVTKEEWQQGFVFSCSVMH | |
| | EALHNHYTQKSLSLSPGK | |
| 254 | APELLGGPSVFLFPPKPKDTLMISRTPEVTCVVVDVSHEDPEVKFNWYVD | Clone |
| | GVEVHNAKTKPREEQYNSTYRVVSVLTVLHQDWLNGKEYKCKVSNKAL | CH3C.35.23.3 |
| | PAPIEKTISKAKGQPREPQVYTLPPSRDELTKNQVSLTCLVKGFYPSDIAVE | |
| | WESYGTEWVNYKTTPPVLDSDGSFFLYSKLTVTKEEWQQGFVFSCSVMH | |
| | EALHNHYTQKSLSLSPGK | |
| 255 | APELLGGPSVFLFPPKPKDTLMISRTPEVTCVVVDVSHEDPEVKFNWYVD | Clone |
| | GVEVHNAKTKPREEQYNSTYRVVSVLTVLHQDWLNGKEYKCKVSNKAL | CH3C.35.23.4 |
| | PAPIEKTISKAKGQPREPQVYTLPPSRDELTKNQVSLTCLVKGFYPSDIAVE | |
| | WESYGTEWSNYKTTPPVLDSDGSFFLYSKLTVSKEEWQQGFVFSCSVMH | |
| | EALHNHYTQKSLSLSPGK | |
| 256 | APELLGGPSVFLFPPKPKDTLMISRTPEVTCVVVDVSHEDPEVKFNWYVD | Clone |
| | GVEVHNAKTKPREEQYNSTYRVVSVLTVLHQDWLNGKEYKCKVSNKAL | CH3C.35.23.5 |
| | PAPIEKTISKAKGQPREPQVYTLPPSRDELTKNQVSLTCLVKGFYPSDIAVE | |
| | WESFGTEWANYKTTPPVLDSDGSFFLYSKLTVTKEEWQQGFVFSCSVMH | |
| | EALHNHYTQKSLSLSPGK | |
| 257 | APELLGGPSVFLFPPKPKDTLMISRTPEVTCVVVDVSHEDPEVKFNWYVD | Clone |
| | GVEVHNAKTKPREEQYNSTYRVVSVLTVLHQDWLNGKEYKCKVSNKAL | CH3C.35.23.6 |
| | PAPIEKTISKAKGQPREPQVYTLPPSRDELTKNQVSLTCLVKGFYPSDIAVE | |
| | WESFGTEWVNYKTTPPVLDSDGSFFLYSKLTVTKEEWQQGFVFSCSVMH | |
| | EALHNHYTQKSLSLSPGK | |
| 258 | APELLGGPSVFLFPPKPKDTLMISRTPEVTCVVVDVSHEDPEVKFNWYVD | Clone |
| | GVEVHNAKTKPREEQYNSTYRVVSVLTVLHQDWLNGKEYKCKVSNKAL | CH3C.35.24.1 |
| | PAPIEKTISKAKGQPREPQVYTLPPSRDELTKNQVSLTCLVKGFYPSDIAV | |
| | WWESFGTEWSNYKTTPPVLDSDGSFFLYSKLTVTKEEWQQGFVFSCSVM | |
| | HEALHNHYTQKSLSLSPGK | |
| 259 | APELLGGPSVFLFPPKPKDTLMISRTPEVTCVVVDVSHEDPEVKFNWYVD | Clone |
| | GVEVHNAKTKPREEQYNSTYRVVSVLTVLHQDWLNGKEYKCKVSNKAL | CH3C.35.24.2 |
| | PAPIEKTISKAKGQPREPQVYTLPPSRDELTKNQVSLTCLVKGFYPSDIAV | |
| | WWESYGTEWANYKTTPPVLDSDGSFFLYSKLTVTKEEWQQGFVFSCSV | |
| | MHEALHNHYTQKSLSLSPGK | |
| 260 | APELLGGPSVFLFPPKPKDTLMISRTPEVTCVVVDVSHEDPEVKFNWYVD | Clone |
| | GVEVHNAKTKPREEQYNSTYRVVSVLTVLHQDWLNGKEYKCKVSNKAL | CH3C.35.24.3 |
| | PAPIEKTISKAKGQPREPQVYTLPPSRDELTKNQVSLTCLVKGFYPSDIAV | |
| | WWESYGTEWVNYKTTPPVLDSDGSFFLYSKLTVTKEEWQQGFVFSCSV | |
| | MHEALHNHYTQKSLSLSPGK | |
| 261 | APELLGGPSVFLFPPKPKDTLMISRTPEVTCVVVDVSHEDPEVKFNWYVD | Clone |
| | GVEVHNAKTKPREEQYNSTYRVVSVLTVLHQDWLNGKEYKCKVSNKAL | CH3C.35.24.4 |
| | PAPIEKTISKAKGQPREPQVYTLPPSRDELTKNQVSLTCLVKGFYPSDIAV | |
| | WWESYGTEWSNYKTTPPVLDSDGSFFLYSKLTVSKEEWQQGFVFSCSVM | |
| | HEALHNHYTQKSLSLSPGK | |
| 262 | APELLGGPSVFLFPPKPKDTLMISRTPEVTCVVVDVSHEDPEVKFNWYVD | Clone |
| | GVEVHNAKTKPREEQYNSTYRVVSVLTVLHQDWLNGKEYKCKVSNKAL | CH3C.35.24.5 |
| | PAPIEKTISKAKGQPREPQVYTLPPSRDELTKNQVSLTCLVKGFYPSDIAV | |
| | WWESFGTEWANYKTTPPVLDSDGSFFLYSKLTVTKEEWQQGFVFSCSVM | |
| | HEALHNHYTQKSLSLSPGK | |
| 263 | APELLGGPSVFLFPPKPKDTLMISRTPEVTCVVVDVSHEDPEVKFNWYVD | Clone |
| | GVEVHNAKTKPREEQYNSTYRVVSVLTVLHQDWLNGKEYKCKVSNKAL | CH3C.35.24.6 |
| | PAPIEKTISKAKGQPREPQVYTLPPSRDELTKNQVSLTCLVKGFYPSDIAV | |
| | WWESFGTEWVNYKTTPPVLDSDGSFFLYSKLTVTKEEWQQGFVFSCSVM | |
| | HEALHNHYTQKSLSLSPGK | |
| 264 | APELLGGPSVFLFPPKPKDTLMISRTPEVTCVVVDVSHEDPEVKFNWYVD | Clone |
| | GVEVHNAKTKPREEQYNSTYRVVSVLTVLHQDWLNGKEYKCKVSNKAL | CH3C.35.21.17.1 |
| | PAPIEKTISKAKGQPREPQVYTLPPSRDELTKNQVSLTCLVKGFYPSDIAVL | |
| | WESFGTEWSSYKTTPPVLDSDGSFFLYSKLTVTKEEWQQGFVFSCSVMHE | |
| | ALHNHYTQKSLSLSPGK | |
| 265 | APELLGGPSVFLFPPKPKDTLMISRTPEVTCVVVDVSHEDPEVKFNWYVD | Clone |
| | GVEVHNAKTKPREEQYNSTYRVVSVLTVLHQDWLNGKEYKCKVSNKAL | CH3C.35.21.17.2 |
| | PAPIEKTISKAKGQPREPQVYTLPPSRDELTKNQVSLTCLVKGFYPSDIAVL | |
| | WESYGTEWASYKTTPPVLDSDGSFFLYSKLTVTKEEWQQGFVFSCSVMH | |
| | EALHNHYTQKSLSLSPGK | |
| 266 | APELLGGPSVFLFPPKPKDTLMISRTPEVTCVVVDVSHEDPEVKFNWYVD | Clone |
| | GVEVHNAKTKPREEQYNSTYRVVSVLTVLHQDWLNGKEYKCKVSNKAL | CH3C.35.21.17.3 |
| | PAPIEKTISKAKGQPREPQVYTLPPSRDELTKNQVSLTCLVKGFYPSDIAVL | |
| | WESYGTEWVSYKTTPPVLDSDGSFFLYSKLTVTKEEWQQGFVFSCSVMH | |
| | EALHNHYTQKSLSLSPGK | |
| 267 | APELLGGPSVFLFPPKPKDTLMISRTPEVTCVVVDVSHEDPEVKFNWYVD | Clone |
| | GVEVHNAKTKPREEQYNSTYRVVSVLTVLHQDWLNGKEYKCKVSNKAL | CH3C.35.21.17.4 |
| | PAPIEKTISKAKGQPREPQVYTLPPSRDELTKNQVSLTCLVKGFYPSDIAVL | |
| | WESYGTEWSSYKTTPPVLDSDGSFFLYSKLTVSKEEWQQGFVFSCSVMH | |
| | EALHNHYTQKSLSLSPGK | |
| 268 | APELLGGPSVFLFPPKPKDTLMISRTPEVTCVVVDVSHEDPEVKFNWYVD | Clone |
| | GVEVHNAKTKPREEQYNSTYRVVSVLTVLHQDWLNGKEYKCKVSNKAL | CH3C.35.21.17.5 |
| | PAPIEKTISKAKGQPREPQVYTLPPSRDELTKNQVSLTCLVKGFYPSDIAVL | |
| | WESFGTEWASYKTTPPVLDSDGSFFLYSKLTVTKEEWQQGFVFSCSVMH | |
| | EALHNHYTQKSLSLSPGK | |
| 269 | APELLGGPSVFLFPPKPKDTLMISRTPEVTCVVVDVSHEDPEVKFNWYVD | Clone |
| | GVEVHNAKTKPREEQYNSTYRVVSVLTVLHQDWLNGKEYKCKVSNKAL | CH3C.35.21.17.6 |
| | PAPIEKTISKAKGQPREPQVYTLPPSRDELTKNQVSLTCLVKGFYPSDIAVL | |
| | WESFGTEWVSYKTTPPVLDSDGSFFLYSKLTVTKEEWQQGFVFSCSVMH | |
| | EALHNHYTQKSLSLSPGK | |
| 270 | APELLGGPSVFLFPPKPKDTLMISRTPEVTCVVVDVSHEDPEVKFNWYVD | Clone |
| | GVEVHNAKTKPREEQYNSTYRVVSVLTVLHQDWLNGKEYKCKVSNKAL | CH3C.35.N390 |
| | PAPIEKTISKAKGQPREPQVYTLPPSRDELTKNQVSLTCLVKGFYPSDIAVE | |
| | WESYGTEWSNYKTTPPVLDSDGSFFLYSKLTVTKSEWQQGFVFSCSVMH | |
| | EALHNHYTQKSLSLSPGK | |
| 271 | APELLGGPSVFLFPPKPKDTLMISRTPEVTCVVVDVSHEDPEVKFNWYVD | Clone |
| | GVEVHNAKTKPREEQYNSTYRVVSVLTVLHQDWLNGKEYKCKVSNKAL | CH3C.35.21 |
| | PAPIEKTISKAKGQPREPQVYTLPPSRDELTKNQVSLWCLVKGFYPSDIAV | with knob |
| | WWESYGTEWSSYKTTPPVLDSDGSFFLYSKLTVTKEEWQQGFVFSCSVM | mutation |
| | HEALHNHYTQKSLSLSPGK | |
| 272 | APEAAGGPSVFLFPPKPKDTLMISRTPEVTCVVVDVSHEDPEVKFNWYVD | Clone |
| | GVEVHNAKTKPREEQYNSTYRVVSVLTVLHQDWLNGKEYKCKVSNKAL | CH3C.35.21 |
| | PAPIEKTISKAKGQPREPQVYTLPPSRDELTKNQVSLWCLVKGFYPSDIAV | with knob |
| | WWESYGTEWSSYKTTPPVLDSDGSFFLYSKLTVTKEEWQQGFVFSCSVM | and LALA |
| | HEALHNHYTQKSLSLSPGK | mutations |
| 273 | APELLGGPSVFLFPPKPKDTLYITREPEVTCVVVDVSHEDPEVKFNWYVD | Clone |
| | GVEVHNAKTKPREEQYNSTYRVVSVLTVLHQDWLNGKEYKCKVSNKAL | CH3C.35.21 |
| | PAPIEKTISKAKGQPREPQVYTLPPSRDELTKNQVSLWCLVKGFYPSDIAV | with knob |
| | WWESYGTEWSSYKTTPPVLDSDGSFFLYSKLTVTKEEWQQGFVFSCSVM | and YTE |
| | HEALHNHYTQKSLSLSPGK | mutations |
| 274 | APEAAGGPSVFLFPPKPKDTLYITREPEVTCVVVDVSHEDPEVKFNWYVD | Clone |
| | GVEVHNAKTKPREEQYNSTYRVVSVLTVLHQDWLNGKEYKCKVSNKAL | CH3C.35.21 |
| | PAPIEKTISKAKGQPREPQVYTLPPSRDELTKNQVSLWCLVKGFYPSDIAV | with knob, |
| | WWESYGTEWSSYKTTPPVLDSDGSFFLYSKLTVTKEEWQQGFVFSCSVM | LALA, and |
| | HEALHNHYTQKSLSLSPGK | YTE mutations |
| 275 | APELLGGPSVFLFPPKPKDTLMISRTPEVTCVVVDVSHEDPEVKFNWYVD | Clone |
| | GVEVHNAKTKPREEQYNSTYRVVSVLTVLHQDWLNGKEYKCKVSNKAL | CH3C.35.21 |
| | PAPIEKTISKAKGQPREPQVYTLPPSRDELTKNQVSLSCAVKGFYPSDIAV | with hole |
| | WWESYGTEWSSYKTTPPVLDSDGSFFLVSKLTVTKEEWQQGFVFSCSVM | mutations |
| | HEALHNHYTQKSLSLSPGK | |
| 276 | APEAAGGPSVFLFPPKPKDTLMISRTPEVTCVVVDVSHEDPEVKFNWYVD | Clone |
| | GVEVHNAKTKPREEQYNSTYRVVSVLTVLHQDWLNGKEYKCKVSNKAL | CH3C.35.21 |
| | PAPIEKTISKAKGQPREPQVYTLPPSRDELTKNQVSLSCAVKGFYPSDIAV | with hole |
| | WWESYGTEWSSYKTTPPVLDSDGSFFLVSKLTVTKEEWQQGFVFSCSVM | and LALA |
| | HEALHNHYTQKSLSLSPGK | mutations |
| 277 | APELLGGPSVFLFPPKPKDTLYITREPEVTCVVVDVSHEDPEVKFNWYVD | Clone |
| | GVEVHNAKTKPREEQYNSTYRVVSVLTVLHQDWLNGKEYKCKVSNKAL | CH3C.35.21 |
| | PAPIEKTISKAKGQPREPQVYTLPPSRDELTKNQVSLSCAVKGFYPSDIAV | with hole |
| | WWESYGTEWSSYKTTPPVLDSDGSFFLVSKLTVTKEEWQQGFVFSCSVM | and YTE |
| | HEALHNHYTQKSLSLSPGK | mutations |
| 278 | APEAAGGPSVFLFPPKPKDTLYITREPEVTCVVVDVSHEDPEVKFNWYVD | Clone |
| | GVEVHNAKTKPREEQYNSTYRVVSVLTVLHQDWLNGKEYKCKVSNKAL | CH3C.35.21 |
| | PAPIEKTISKAKGQPREPQVYTLPPSRDELTKNQVSLSCAVKGFYPSDIAV | with hole, |
| | WWESYGTEWSSYKTTPPVLDSDGSFFLVSKLTVTKEEWQQGFVFSCSVM | LALA, and |
| | HEALHNHYTQKSLSLSPGK | YTE mutations |
| 279 | APELLGGPSVFLFPPKPKDTLMISRTPEVTCVVVDVSHEDPEVKFNWYVD | Fc sequence |
| | GVEVHNAKTKPREEQYNSTYRVVSVLTVLHQDWLNGKEYKCKVSNKAL | with hole |
| | PAPIEKTISKAKGQPREPQVYTLPPSRDELTKNQVSLSCAVKGFYPSDIAVE | mutations |
| | WESNGQPENNYKTTPPVLDSDGSFFLVSKLTVDKSRWQQGNVFSCSVMH | |
| | EALHNHYTQKSLSLSPGK | |
| 280 | APEAAGGPSVFLFPPKPKDTLMISRTPEVTCVVVDVSHEDPEVKFNWYVD | Fc sequence |
| | GVEVHNAKTKPREEQYNSTYRVVSVLTVLHQDWLNGKEYKCKVSNKAL | with hole |
| | PAPIEKTISKAKGQPREPQVYTLPPSRDELTKNQVSLSCAVKGFYPSDIAVE | and LALA |
| | WESNGQPENNYKTTPPVLDSDGSFFLVSKLTVDKSRWQQGNVFSCSVMH | mutations |
| | EALHNHYTQKSLSLSPGK | |
| 281 | APELLGGPSVFLFPPKPKDTLYITREPEVTCVVVDVSHEDPEVKFNWYVD | Fc sequence |
| | GVEVHNAKTKPREEQYNSTYRVVSVLTVLHQDWLNGKEYKCKVSNKAL | with hole |
| | PAPIEKTISKAKGQPREPQVYTLPPSRDELTKNQVSLSCAVKGFYPSDIAVE | and YTE |
| | WESNGQPENNYKTTPPVLDSDGSFFLVSKLTVDKSRWQQGNVFSCSVMH | mutations |
| | EALHNHYTQKSLSLSPGK | |
| 282 | APEAAGGPSVFLFPPKPKDTLYITREPEVTCVVVDVSHEDPEVKFNWYVD | Fc sequence |
| | GVEVHNAKTKPREEQYNSTYRVVSVLTVLHQDWLNGKEYKCKVSNKAL | withhole, |
| | PAPIEKTISKAKGQPREPQVYTLPPSRDELTKNQVSLSCAVKGFYPSDIAVE | LALA, and |
| | WESNGQPENNYKTTPPVLDSDGSFFLVSKLTVDKSRWQQGNVFSCSVMH | YTE mutations |
| | EALHNHYTQKSLSLSPGK | |
| 283 | APELLGGPSVFLFPPKPKDTLMISRTPEVTCVVVDVSHEDPEVKFNWYVD | Fc sequence |
| | GVEVHNAKTKPREEQYNSTYRVVSVLTVLHQDWLNGKEYKCKVSNKAL | with knob |
| | PAPIEKTISKAKGQPREPQVYTLPPSRDELTKNQVSLWCLVKGFYPSDIAV | mutation |
| | EWESNGQPENNYKTTPPVLDSDGSFFLYSKLTVDKSRWQQGNVFSCSVM | |
| | HEALHNHYTQKSLSLSPGK | |
| 284 | APEAAGGPSVFLFPPKPKDTLMISRTPEVTCVVVDVSHEDPEVKFNWYVD | Fc sequence |
| | GVEVHNAKTKPREEQYNSTYRVVSVLTVLHQDWLNGKEYKCKVSNKAL | with knob |
| | PAPIEKTISKAKGQPREPQVYTLPPSRDELTKNQVSLWCLVKGFYPSDIAV | and LALA |
| | EWESNGQPENNYKTTPPVLDSDGSFFLYSKLTVDKSRWQQGNVFSCSVM | mutations |
| | HEALHNHYTQKSLSLSPGK | |
| 285 | APELLGGPSVFLFPPKPKDTLYITREPEVTCVVVDVSHEDPEVKFNWYVD | Fc sequence |
| | GVEVHNAKTKPREEQYNSTYRVVSVLTVLHQDWLNGKEYKCKVSNKAL | with knob |
| | PAPIEKTISKAKGQPREPQVYTLPPSRDELTKNQVSLWCLVKGFYPSDIAV | and YTE |
| | EWESNGQPENNYKTTPPVLDSDGSFFLYSKLTVDKSRWQQGNVFSCSVM | mutations |
| | HEALHNHYTQKSLSLSPGK | |
| 286 | APEAAGGPSVFLFPPKPKDTLYITREPEVTCVVVDVSHEDPEVKFNWYVD | Fc sequence |
| | GVEVHNAKTKPREEQYNSTYRVVSVLTVLHQDWLNGKEYKCKVSNKAL | with knob, |
| | PAPIEKTISKAKGQPREPQVYTLPPSRDELTKNQVSLWCLVKGFYPSDIAV | LALA, and |
| | EWESNGQPENNYKTTPPVLDSDGSFFLYSKLTVDKSRWQQGNVFSCSVM | YTE mutations |
| | HEALHNHYTQKSLSLSPGK | |
| 287 | EPKSCDKTHTCPPCP | Human IgG1 |
| | | hinge amino |
| | | acid sequence |
| 288 | MMDQARSAFSNLFGGEPLSYTRFSLARQVDGDNSHVEMKLAVDEEENA | Human |
| | DNNTKANVTKPKRCSGSICYGTIAVIVFFLIGFMIGYLGYCKGVEPKTECE | transferrin |
| | RLAGTESPVREEPGEDFPAARRLYWDDLKRKLSEKLDSTDFTGTIKLLNE | receptor |
| | NSYVPREAGSQKDENLALYVENQFREFKLSKVWRDQHFVKIQVKDSAQN | protein 1 |
| | SVIIVDKNGRLVYLVENPGGYVAYSKAATVTGKLVHANFGTKKDFEDLY | (TFR1) |
| | TPVNGSIVIVRAGKITFAEKVANAESLNAIGVLIYMDQTKFPIVNAELSFFG | |
| | HAHLGTGDPYTPGFPSFNHTQFPPSRSSGLPNIPVQTISRAAAEKLFGNME | |
| | GDCPSDWKTDSTCRMVTSESKNVKLTVSNVLKEIKILNIFGVIKGFVEPDH | |
| | YVVVGAQRDAWGPGAAKSGVGTALLLKLAQMFSDMVLKDGFQPSRSIIF | |
| | ASWSAGDFGSVGATEWLEGYLSSLHLKAFTYINLDKAVLGTSNFKVSASP | |
| | LLYTLIEKTMQNVKHPVTGQFLYQDSNWASKVEKLTLDNAAFPFLAYSGI | |
| | PAVSFCFCEDTDYPYLGTTMDTYKELIERIPELNKVARAAAEVAGQFVIKL | |
| | THDVELNLDYERYNSQLLSFVRDLNQYRADIKEMGLSLQWLYSARGDFF | |
| | RATSRLTTDFGNAEKTDRFVMKKLNDRVMRVEYHFLSPYVSPKESPFRH | |
| | VFWGSGSHTLPALLENLKLRKQNNGAFNETLFRNQLALATWTIQGAANA | |
| | LSGDVWDIDNEF | |
| 289 | APELLGGPSVFLFPPKPKDTLMISRTPEVTCVVVDVSHEDPEVKFNWYVD | Clone CH3B.1 |
| | GVEVHNAKTKPREEQYNSTYRVVSVLTVLHQDWLNGKEYKCKVSNKAL | |
| | PAPIEKTISKAKGQPRFDYVTTLPPSRDELTKNQVSLTCLVKGFYPSDIAVE | |
| | WESNGQPENNYKTTPPVLDSDGSFFLYSKLTVDKSRWQQGNVFSCSVMH | |
| | EALHNHYGFHDLSLSPGK | |
| 290 | APELLGGPSVFLFPPKPKDTLMISRTPEVTCVVVDVSHEDPEVKFNWYVD | Clone CH3B.2 |
| | GVEVHNAKTKPREEQYNSTYRVVSVLTVLHQDWLNGKEYKCKVSNKAL | |
| | PAPIEKTISKAKGQPRFDMVTTLPPSRDELTKNQVSLTCLVKGFYPSDIAV | |
| | EWESNGQPENNYKTTPPVLDSDGSFFLYSKLTVDKSRWQQGNVFSCSVM | |
| | HEALHNHYGFHDLSLSPGK | |
| 291 | APELLGGPSVFLFPPKPKDTLMISRTPEVTCVVVDVSHEDPEVKFNWYVD | Clone CH3B.3 |
| | GVEVHNAKTKPREEQYNSTYRVVSVLTVLHQDWLNGKEYKCKVSNKAL | |
| | PAPIEKTISKAKGQPRFEYVTTLPPSRDELTKNQVSLTCLVKGFYPSDIAVE | |
| | WESNGQPENNYKTTPPVLDSDGSFFLYSKLTVDKSRWQQGNVFSCSVMH | |
| | EALHNHYGFHDLSLSPGK | |
| 292 | APELLGGPSVFLFPPKPKDTLMISRTPEVTCVVVDVSHEDPEVKFNWYVD | Clone CH3B.4 |
| | GVEVHNAKTKPREEQYNSTYRVVSVLTVLHQDWLNGKEYKCKVSNKAL | |
| | PAPIEKTISKAKGQPRFEMVTTLPPSRDELTKNQVSLTCLVKGFYPSDIAVE | |
| | WESNGQPENNYKTTPPVLDSDGSFFLYSKLTVDKSRWQQGNVFSCSVMH | |
| | EALHNHYGFHDLSLSPGK | |
| 293 | APELLGGPSVFLFPPKPKDTLMISRTPEVTCVVVDVSHEDPEVKFNWYVD | Clone CH3B.5 |
| | GVEVHNAKTKPREEQYNSTYRVVSVLTVLHQDWLNGKEYKCKVSNKAL | |
| | PAPIEKTISKAKGQPRFELVTTLPPSRDELTKNQVSLTCLVKGFYPSDIAVE | |
| | WESNGQPENNYKTTPPVLDSDGSFFLYSKLTVDKSRWQQGNVFSCSVMH | |
| | EALHNHYGFHDLSLSPGK | |
| 294 | APELLGGPSVFLFPPKPKDTLMISRTPEVTCVVVDVSHEDPEVEFIWYVDG | Clone CH2A2.1 |
| | VDVRYEWQLPREEQYNSTYRVVSVLTVLHQDWLNGKEYKCKVSNKALP | |
| | APIEKTISKAKGQPREPQVYTLPPSRDELTKNQVSLTCLVKGFYPSDIAVE | |
| | WESNGQPENNYKTTPPVLDSDGSFFLYSKLTVDKSRWQQGNVFSCSVMH | |
| | EALHNHYTQKSLSLSPGK | |
| 295 | APELLGGPSVFLFPPKPKDTLMISRTPEVTCVVVDVSHEDPEVGFVWYVD | Clone CH2A2.2 |
| | GVPVSWEWYWPREEQYNSTYRVVSVLTVLHQDWLNGKEYKCKVSNKA | |
| | LPAPIEKTISKAKGQPREPQVYTLPPSRDELTKNQVSLTCLVKGFYPSDIAV | |
| | EWESNGQPENNYKTTPPVLDSDGSFFLYSKLTVDKSRWQQGNVFSCSVM | |
| | HEALHNHYTQKSLSLSPGK | |
| 296 | APELLGGPSVFLFPPKPKDTLMISRTPEVTCVVVDVSHEDPEVQFDWYVD | Clone CH2A2.3 |
| | GVMVRREWHRPREEQYNSTYRVVSVLTVLHQDWLNGKEYKCKVSNKA | |
| | LPAPIEKTISKAKGQPREPQVYTLPPSRDELTKNQVSLTCLVKGFYPSDIAV | |
| | EWESNGQPENNYKTTPPVLDSDGSFFLYSKLTVDKSRWQQGNVFSCSVM | |
| | HEALHNHYTQKSLSLSPGK | |
| 297 | APELLGGPSVFLFPPKPKDTLMISRTPEVTCVVVDVSHEDPEVSFEWYVD | Clone CH2A2.4 |
| | GVPVRWEWQWPREEQYNSTYRVVSVLTVLHQDWLNGKEYKCKVSNKA | |
| | LPAPIEKTISKAKGQPREPQVYTLPPSRDELTKNQVSLTCLVKGFYPSDIAV | |
| | EWESNGQPENNYKTTPPVLDSDGSFFLYSKLTVDKSRWQQGNVFSCSVM | |
| | HEALHNHYTQKSLSLSPGK | |
| 298 | APELLGGPSVFLFPPKPKDTLMISRTPEVTCVVVDVSHEDPEVAFTWYVD | Clone CH2A2.5 |
| | GVPVRWEWQNPREEQYNSTYRVVSVLTVLHQDWLNGKEYKCKVSNKA | |
| | LPAPIEKTISKAKGQPREPQVYTLPPSRDELTKNQVSLTCLVKGFYPSDIAV | |
| | EWESNGQPENNYKTTPPVLDSDGSFFLYSKLTVDKSRWQQGNVFSCSVM | |
| | HEALHNHYTQKSLSLSPGK | |
| 299 | APELLGGPSVFLFPPKPKDTLMISRTPEVTCVVVDPQTPPWEVKFNWYVD | Clone CH2C.1 |
| | GVEVHNAKTKPREEEYYTYYRVVSVLTVLHQDWLNGKEYKCKVSNKAL | |
| | PAPIEKTISKAKGQPREPQVYTLPPSRDELTKNQVSLTCLVKGFYPSDIAVE | |
| | WESNGQPENNYKTTPPVLDSDGSFFLYSKLTVDKSRWQQGNVFSCSVMH | |
| | EALHNHYTQKSLSLSPGK | |
| 300 | APELLGGPSVFLFPPKPKDTLMISRTPEVTCVVVDPPSPPWEVKFNWYVD | Clone CH2C.2 |
| | GVEVHNAKTKPREEEYYSNYRVVSVLTVLHQDWLNGKEYKCKVSNKAL | |
| | PAPIEKTISKAKGQPREPQVYTLPPSRDELTKNQVSLTCLVKGFYPSDIAVE | |
| | WESNGQPENNYKTTPPVLDSDGSFFLYSKLTVDKSRWQQGNVFSCSVMH | |
| | EALHNHYTQKSLSLSPGK | |
| 301 | APELLGGPSVFLFPPKPKDTLMISRTPEVTCVVVDPQTPPWEVKFNWYVD | Clone CH2C.3 |
| | GVEVHNAKTKPREEEYYSNYRVVSVLTVLHQDWLNGKEYKCKVSNKAL | |
| | PAPIEKTISKAKGQPREPQVYTLPPSRDELTKNQVSLTCLVKGFYPSDIAVE | |
| | WESNGQPENNYKTTPPVLDSDGSFFLYSKLTVDKSRWQQGNVFSCSVMH | |
| | EALHNHYTQKSLSLSPGK | |
| 302 | APELLGGPSVFLFPPKPKDTLMISRTPEVTCVVVDFRGPPWEVKFNWYVD | Clone CH2C.4 |
| | GVEVHNAKTKPREEEYYHDYRVVSVLTVLHQDWLNGKEYKCKVSNKAL | |
| | PAPIEKTISKAKGQPREPQVYTLPPSRDELTKNQVSLTCLVKGFYPSDIAVE | |
| | WESNGQPENNYKTTPPVLDSDGSFFLYSKLTVDKSRWQQGNVFSCSVMH | |
| | EALHNHYTQKSLSLSPGK | |
| 303 | APELLGGPSVFLFPPKPKDTLMISRTPEVTCVVVDPQTVPWEVKFNWYVD | Clone CH2C.5 |
| | GVEVHNAKTKPREEEYYSNYRVVSVLTVLHQDWLNGKEYKCKVSNKAL | |
| | PAPIEKTISKAKGQPREPQVYTLPPSRDELTKNQVSLTCLVKGFYPSDIAVE | |
| | WESNGQPENNYKTTPPVLDSDGSFFLYSKLTVDKSRWQQGNVFSCSVMH | |
| | EALHNHYTQKSLSLSPGK | |
| 304 | APELLGGPSVFLFPPKPKDTLMISRTPEVTCVVVDVSVPPRMVKFNWYVD | Clone CH2D.1 |
| | GVEVHNAKTKSLTSQHNSTVRVVSVLTVLHQDWLNGKEYKCKVSNKAL | |
| | PAPIEKTISKAKGQPREPQVYTLPPSRDELTKNQVSLTCLVKGFYPSDIAVE | |
| | WESNGQPENNYKTTPPVLDSDGSFFLYSKLTVDKSRWQQGNVFSCSVMH | |
| | EALHNHYTQKSLSLSPGK | |
| 305 | APELLGGPSVFLFPPKPKDTLMISRTPEVTCVVVDVSVPPWMVKFNWYV | Clone CH2D.2 |
| | DGVEVHNAKTKSLTSQHNSTVRVVSVLTVLHQDWLNGKEYKCKVSNKA | |
| | LPAPIEKTISKAKGQPREPQVYTLPPSRDELTKNQVSLTCLVKGFYPSDIAV | |
| | EWESNGQPENNYKTTPPVLDSDGSFFLYSKLTVDKSRWQQGNVFSCSVM | |
| | HEALHNHYTQKSLSLSPGK | |
| 306 | APELLGGPSVFLFPPKPKDTLMISRTPEVTCVVVDVSDMWEYVKFNWYV | Clone CH2D.3 |
| | DGVEVHNAKTKPWVKQLNSTWRVVSVLTVLHQDWLNGKEYKCKVSNK | |
| | ALPAPIEKTISKAKGQPREPQVYTLPPSRDELTKNQVSLTCLVKGFYPSDIA | |
| | VEWESNGQPENNYKTTPPVLDSDGSFFLYSKLTVDKSRWQQGNVFSCSV | |
| | MHEALHNHYTQKSLSLSPGK | |
| 307 | APELLGGPSVFLFPPKPKDTLMISRTPEVTCVVVDVSDDWTWVKFNWYV | Clone CH2D.4 |
| | DGVEVHNAKTKPWIAQPNSTWRVVSVLTVLHQDWLNGKEYKCKVSNK | |
| | ALPAPIEKTISKAKGQPREPQVYTLPPSRDELTKNQVSLTCLVKGFYPSDIA | |
| | VEWESNGQPENNYKTTPPVLDSDGSFFLYSKLTVDKSRWQQGNVFSCSV | |
| | MHEALHNHYTQKSLSLSPGK | |
| 308 | APELLGGPSVFLFPPKPKDTLMISRTPEVTCVVVDVSDDWEWVKFNWYV | Clone CH2D.5 |
| | DGVEVHNAKTKPWKLQLNSTWRVVSVLTVLHQDWLNGKEYKCKVSNK | |
| | ALPAPIEKTISKAKGQPREPQVYTLPPSRDELTKNQVSLTCLVKGFYPSDIA | |
| | VEWESNGQPENNYKTTPPVLDSDGSFFLYSKLTVDKSRWQQGNVFSCSV | |
| | MHEALHNHYTQKSLSLSPGK | |
| 309 | APELLGGPSVFLFPPKPKDTLMISRTPEVTCVVVDVSHEDPWVWFYWYV | Clone CH2E3.1 |
| | DGVEVHNAKTKPREEQYNSTYRVVSVLTVLHQDWLNGKEYKCSVVNIA | |
| | LWWSIEKTISKAKGQPREPQVYTLPPSRDELTKNQVSLTCLVKGFYPSDIA | |
| | VEWESNGQPENNYKTTPPVLDSDGSFFLYSKLTVDKSRWQQGNVFSCSV | |
| | MHEALHNHYTQKSLSLSPGK | |
| 310 | APELLGGPSVFLFPPKPKDTLMISRTPEVTCVVVDVSHEDPVVGFRWYVD | Clone CH2E3.2 |
| | GVEVHNAKTKPREEQYNSTYRVVSVLTVLHQDWLNGKEYKCRVSNSAL | |
| | TWKIEKTISKAKGQPREPQVYTLPPSRDELTKNQVSLTCLVKGFYPSDIAV | |
| | EWESNGQPENNYKTTPPVLDSDGSFFLYSKLTVDKSRWQQGNVFSCSVM | |
| | HEALHNHYTQKSLSLSPGK | |
| 311 | APELLGGPSVFLFPPKPKDTLMISRTPEVTCVVVDVSHEDPVVGFRWYVD | Clone CH2E3.3 |
| | GVEVHNAKTKPREEQYNSTYRVVSVLTVLHQDWLNGKEYKCRVSNSAL | |
| | SWRIEKTISKAKGQPREPQVYTLPPSRDELTKNQVSLTCLVKGFYPSDIAV | |
| | EWESNGQPENNYKTTPPVLDSDGSFFLYSKLTVDKSRWQQGNVFSCSVM | |
| | HEALHNHYTQKSLSLSPGK | |
| 312 | APELLGGPSVFLFPPKPKDTLMISRTPEVTCVVVDVSHEDPIVGFRWYVDG | Clone CH2E3.4 |
| | VEVHNAKTKPREEQYNSTYRVVSVLTVLHQDWLNGKEYKCRVSNSALR | |
| | WRIEKTISKAKGQPREPQVYTLPPSRDELTKNQVSLTCLVKGFYPSDIAVE | |
| | WESNGQPENNYKTTPPVLDSDGSFFLYSKLTVDKSRWQQGNVFSCSVMH | |
| | EALHNHYTQKSLSLSPGK | |
| 313 | APELLGGPSVFLFPPKPKDTLMISRTPEVTCVVVDVSHEDPAVGFEWYVD | Clone CH2E3.5 |
| | GVEVHNAKTKPREEQYNSTYRVVSVLTVLHQDWLNGKEYKCQVFNWA | |
| | LDWVIEKTISKAKGQPREPQVYTLPPSRDELTKNQVSLTCLVKGFYPSDIA | |
| | VEWESNGQPENNYKTTPPVLDSDGSFFLYSKLTVDKSRWQQGNVFSCSV | |
| | MHEALHNHYTQKSLSLSPGK | |
| 314 | EVKLVESGGGLVKPGGSLKLSCAASGFTFSSYGMSWVRQTPEKRLEWVA | 1C7 VH + CH1 |
| | SISGDGGSYIHYADSVKGRFTISRDSAKNTLYLQMSSLRSEDTALYYCARL | sequence |
| | PYWGQGTLVTVSAASTKGPSVFPLAPSSKSTSGGTAALGCLVKDYFPEPV | |
| | TVSWNSGALTSGVHTFPAVLQSSGLYSLSSVVTVPSSSLGTQTYICNVNH | |
| | KPSNTKVDKKVEPKSCDKTH | |
| 315 | DIVMTQSPSSLTVTAGEKVTMSCKSSQSLLNSGNQKNYLTWYQQKPGQP | ch1C7.LC |
| | PKLLIYWASTRESGVPDRFTGSGSGTDFTLTISNVQSEDLAEYFCQQYNSY | |
| | PLTFGAGTKLELKRTVAAPSVFIFPPSDEQLKSGTASVVCLLNNFYPREAK | |
| | VQWKVDNALQSGNSQESVTEQDSKDSTYSLSSTLTLSKADYEKHKVYAC | |
| | EVTHQGLSSPVTKSFNRGEC | |
| 316 | EVKLVESGGGLVKPGGSLKLSCAASGFTFSSYGMSWVRQTPEKRLEWVA | ch1C7.HC.LALAPG. |
| | SISGDGGSYIHYADSVKGRFTISRDSAKNTLYLQMSSLRSEDTALYYCARL | hole |
| | PYWGQGTLVTVSAASTKGPSVFPLAPSSKSTSGGTAALGCLVKDYFPEPV | |
| | TVSWNSGALTSGVHTFPAVLQSSGLYSLSSVVTVPSSSLGTQTYICNVNH | |
| | KPSNTKVDKKVEPKSCDKTHTCPPCPAPEAAGGPSVFLFPPKPKDTLMISR | |
| | TPEVTCVVVDVSHEDPEVKFNWYVDGVEVHNAKTKPREEQYNSTYRVV | |
| | SVLTVLHQDWLNGKEYKCKVSNKALGAPIEKTISKAKGQPREPQVYTLPP | |
| | SRDELTKNQVSLSCAVKGFYPSDIAVEWESNGQPENNYKTTPPVLDSDGS | |
| | FFLVSKLTVDKSRWQQGNVFSCSVMHEALHNHYTQKSLSLSPGK | |
| 317 | EVKLVESGGGLVKPGGSLKLSCAASGFTFSSYGMSWVRQTPEKRLEWVA | ch1C7.HC.CH3C.35. |
| | SISGDGGSYIHYADSVKGRFTISRDSAKNTLYLQMSSLRSEDTALYYCARL | 21.LALAPG.knob |
| | PYWGQGTLVTVSAASTKGPSVFPLAPSSKSTSGGTAALGCLVKDYFPEPV | |
| | TVSWNSGALTSGVHTFPAVLQSSGLYSLSSVVTVPSSSLGTQTYICNVNH | |
| | KPSNTKVDKKVEPKSCDKTHTCPPCPAPEAAGGPSVFLFPPKPKDTLMISR | |
| | TPEVTCVVVDVSHEDPEVKFNWYVDGVEVHNAKTKPREEQYNSTYRVV | |
| | SVLTVLHQDWLNGKEYKCKVSNKALGAPIEKTISKAKGQPREPQVYTLPP | |
| | SRDELTKNQVSLWCLVKGFYPSDIAVWWESYGTEWSSYKTTPPVLDSDG | |
| | SFFLYSKLTVTKEEWQQGFVFSCSVMHEALHNHYTQKSLSLSPGK | |
| 318 | EVKLVESGGGLVKPGGSLKLSCAASGFTFSSYGMSWVRQTPEKRLEWVA | ch1C7.HC.CH3C.35. |
| | SISGDGGSYIHYADSVKGRFTISRDSAKNTLYLQMSSLRSEDTALYYCARL | 21 with knob |
| | PYWGQGTLVTVSAASTKGPSVFPLAPSSKSTSGGTAALGCLVKDYFPEPV | mutation |
| | TVSWNSGALTSGVHTFPAVLQSSGLYSLSSVVTVPSSSLGTQTYICNVNH | |
| | KPSNTKVDKKVEPKSCDKTHTCPPCPAPELLGGPSVFLFPPKPKDTLMISR | |
| | TPEVTCVVVDVSHEDPEVKFNWYVDGVEVHNAKTKPREEQYNSTYRVV | |
| | SVLTVLHQDWLNGKEYKCKVSNKALPAPIEKTISKAKGQPREPQVYTLPP | |
| | SRDELTKNQVSLWCLVKGFYPSDIAVWWESYGTEWSSYKTTPPVLDSDG | |
| | SFFLYSKLTVTKEEWQQGFVFSCSVMHEALHNHYTQKSLSLSPGK | |
| 319 | EVKLVESGGGLVKPGGSLKLSCAASGFTFSSYGMSWVRQTPEKRLEWVA | ch1C7.HC.CH3C.35. |
| | SISGDGGSYIHYADSVKGRFTISRDSAKNTLYLQMSSLRSEDTALYYCARL | 21 with knob and |
| | PYWGQGTLVTVSAASTKGPSVFPLAPSSKSTSGGTAALGCLVKDYFPEPV | LALA mutations |
| | TVSWNSGALTSGVHTFPAVLQSSGLYSLSSVVTVPSSSLGTQTYICNVNH | |
| | KPSNTKVDKKVEPKSCDKTHTCPPCPAPEAAGGPSVFLFPPKPKDTLMISR | |
| | TPEVTCVVVDVSHEDPEVKFNWYVDGVEVHNAKTKPREEQYNSTYRVV | |
| | SVLTVLHQDWLNGKEYKCKVSNKALPAPIEKTISKAKGQPREPQVYTLPP | |
| | SRDELTKNQVSLWCLVKGFYPSDIAVWWESYGTEWSSYKTTPPVLDSDG | |
| | SFFLYSKLTVTKEEWQQGFVFSCSVMHEALHNHYTQKSLSLSPGK | |
| 320 | EVKLVESGGGLVKPGGSLKLSCAASGFTFSSYGMSWVRQTPEKRLEWVA | ch1C7.HC.CH3C.35. |
| | SISGDGGSYIHYADSVKGRFTISRDSAKNTLYLQMSSLRSEDTALYYCARL | 21 with knob and |
| | PYWGQGTLVTVSAASTKGPSVFPLAPSSKSTSGGTAALGCLVKDYFPEPV | YTE mutations |
| | TVSWNSGALTSGVHTFPAVLQSSGLYSLSSVVTVPSSSLGTQTYICNVNH | |
| | KPSNTKVDKKVEPKSCDKTHTCPPCPAPELLGGPSVFLFPPKPKDTLYITR | |
| | EPEVTCVVVDVSHEDPEVKFNWYVDGVEVHNAKTKPREEQYNSTYRVV | |
| | SVLTVLHQDWLNGKEYKCKVSNKALPAPIEKTISKAKGQPREPQVYTLPP | |
| | SRDELTKNQVSLWCLVKGFYPSDIAVWWESYGTEWSSYKTTPPVLDSDG | |
| | SFFLYSKLTVTKEEWQQGFVFSCSVMHEALHNHYTQKSLSLSPGK | |
| 321 | EVKLVESGGGLVKPGGSLKLSCAASGFTFSSYGMSWVRQTPEKRLEWVA | ch1C7.HC.CH3C.35. |
| | SISGDGGSYIHYADSVKGRFTISRDSAKNTLYLQMSSLRSEDTALYYCARL | 21 with knob, LALA, |
| | PYWGQGTLVTVSAASTKGPSVFPLAPSSKSTSGGTAALGCLVKDYFPEPV | and YTE mutations |
| | TVSWNSGALTSGVHTFPAVLQSSGLYSLSSVVTVPSSSLGTQTYICNVNH | |
| | KPSNTKVDKKVEPKSCDKTHTCPPCPAPEAAGGPSVFLFPPKPKDTLYITR | |
| | EPEVTCVVVDVSHEDPEVKFNWYVDGVEVHNAKTKPREEQYNSTYRVV | |
| | SVLTVLHQDWLNGKEYKCKVSNKALPAPIEKTISKAKGQPREPQVYTLPP | |
| | SRDELTKNQVSLWCLVKGFYPSDIAVWWESYGTEWSSYKTTPPVLDSDG | |
| | SFFLYSKLTVTKEEWQQGFVFSCSVMHEALHNHYTQKSLSLSPGK | |
| 322 | EVKLVESGGGLVKPGGSLKLSCAASGFTFSSYGMSWVRQTPEKRLEWVA | ch1C7.HC.CH3C.35. |
| | SISGDGGSYIHYADSVKGRFTISRDSAKNTLYLQMSSLRSEDTALYYCARL | 21 with knob, |
| | PYWGQGTLVTVSAASTKGPSVFPLAPSSKSTSGGTAALGCLVKDYFPEPV | LALAPG, and YTE |
| | TVSWNSGALTSGVHTFPAVLQSSGLYSLSSVVTVPSSSLGTQTYICNVNH | mutations |
| | KPSNTKVDKKVEPKSCDKTHTCPPCPAPEAAGGPSVFLFPPKPKDTLYITR | |
| | EPEVTCVVVDVSHEDPEVKFNWYVDGVEVHNAKTKPREEQYNSTYRVV | |
| | SVLTVLHQDWLNGKEYKCKVSNKALGAPIEKTISKAKGQPREPQVYTLPP | |
| | SRDELTKNQVSLWCLVKGFYPSDIAVWWESYGTEWSSYKTTPPVLDSDG | |
| | SFFLYSKLTVTKEEWQQGFVFSCSVMHEALHNHYTQKSLSLSPGK | |
| 323 | EVKLVESGGGLVKPGGSLKLSCAASGFTFSSYGMSWVRQTPEKRLEWVA | ch1C7.HC.CH3C.35. |
| | SISGDGGSYIHYADSVKGRFTISRDSAKNTLYLQMSSLRSEDTALYYCARL | 21 with hole |
| | PYWGQGTLVTVSAASTKGPSVFPLAPSSKSTSGGTAALGCLVKDYFPEPV | mutations |
| | TVSWNSGALTSGVHTFPAVLQSSGLYSLSSVVTVPSSSLGTQTYICNVNH | |
| | KPSNTKVDKKVEPKSCDKTHTCPPCPAPELLGGPSVFLFPPKPKDTLMISR | |
| | TPEVTCVVVDVSHEDPEVKFNWYVDGVEVHNAKTKPREEQYNSTYRVV | |
| | SVLTVLHQDWLNGKEYKCKVSNKALPAPIEKTISKAKGQPREPQVYTLPP | |
| | SRDELTKNQVSLSCAVKGFYPSDIAVWWESYGTEWSSYKTTPPVLDSDGS | |
| | FFLVSKLTVTKEEWQQGFVFSCSVMHEALHNHYTQKSLSLSPGK | |
| 324 | EVKLVESGGGLVKPGGSLKLSCAASGFTFSSYGMSWVRQTPEKRLEWVA | ch1C7.HC.CH3C.35. |
| | SISGDGGSYIHYADSVKGRFTISRDSAKNTLYLQMSSLRSEDTALYYCARL | 21 with hole and |
| | PYWGQGTLVTVSAASTKGPSVFPLAPSSKSTSGGTAALGCLVKDYFPEPV | LALA mutations |
| | TVSWNSGALTSGVHTFPAVLQSSGLYSLSSVVTVPSSSLGTQTYICNVNH | |
| | KPSNTKVDKKVEPKSCDKTHTCPPCPAPEAAGGPSVFLFPPKPKDTLMISR | |
| | TPEVTCVVVDVSHEDPEVKFNWYVDGVEVHNAKTKPREEQYNSTYRVV | |
| | SVLTVLHQDWLNGKEYKCKVSNKALPAPIEKTISKAKGQPREPQVYTLPP | |
| | SRDELTKNQVSLSCAVKGFYPSDIAVWWESYGTEWSSYKTTPPVLDSDGS | |
| | FFLVSKLTVTKEEWQQGFVFSCSVMHEALHNHYTQKSLSLSPGK | |
| 325 | EVKLVESGGGLVKPGGSLKLSCAASGFTFSSYGMSWVRQTPEKRLEWVA | ch1C7.HC.CH3C.35. |
| | SISGDGGSYIHYADSVKGRFTISRDSAKNTLYLQMSSLRSEDTALYYCARL | 21 with hole and |
| | PYWGQGTLVTVSAASTKGPSVFPLAPSSKSTSGGTAALGCLVKDYFPEPV | LALAPG mutations |
| | TVSWNSGALTSGVHTFPAVLQSSGLYSLSSVVTVPSSSLGTQTYICNVNH | |
| | KPSNTKVDKKVEPKSCDKTHTCPPCPAPEAAGGPSVFLFPPKPKDTLMISR | |
| | TPEVTCVVVDVSHEDPEVKFNWYVDGVEVHNAKTKPREEQYNSTYRVV | |
| | SVLTVLHQDWLNGKEYKCKVSNKALGAPIEKTISKAKGQPREPQVYTLPP | |
| | SRDELTKNQVSLSCAVKGFYPSDIAVVVWESYGTEWSSYKTTPPVLDSDGS | |
| | FFLVSKLTVTKEEWQQGFVFSCSVMHEALHNHYTQKSLSLSPGK | |
| 326 | EVKLVESGGGLVKPGGSLKLSCAASGFTFSSYGMSWVRQTPEKRLEWVA | ch1C7.HC.CH3C.35. |
| | SISGDGGSYIHYADSVKGRFTISRDSAKNTLYLQMSSLRSEDTALYYCARL | 21 with hole and YTE |
| | PYWGQGTLVTVSAASTKGPSVFPLAPSSKSTSGGTAALGCLVKDYFPEPV | mutations |
| | TVSWNSGALTSGVHTFPAVLQSSGLYSLSSVVTVPSSSLGTQTYICNVNH | |
| | KPSNTKVDKKVEPKSCDKTHTCPPCPAPELLGGPSVFLFPPKPKDTLYITR | |
| | EPEVTCVVVDVSHEDPEVKFNWYVDGVEVHNAKTKPREEQYNSTYRVV | |
| | SVLTVLHQDWLNGKEYKCKVSNKALPAPIEKTISKAKGQPREPQVYTLPP | |
| | SRDELTKNQVSLSCAVKGFYPSDIAVVVWESYGTEWSSYKTTPPVLDSDGS | |
| | FFLVSKLTVTKEEWQQGFVFSCSVMHEALHNHYTQKSLSLSPGK | |
| 327 | EVKLVESGGGLVKPGGSLKLSCAASGFTFSSYGMSWVRQTPEKRLEWVA | ch1C7.HC.CH3C.35. |
| | SISGDGGSYIHYADSVKGRFTISRDSAKNTLYLQMSSLRSEDTALYYCARL | 21 with hole, LALA, |
| | PYWGQGTLVTVSAASTKGPSVFPLAPSSKSTSGGTAALGCLVKDYFPEPV | and YTE mutations |
| | TVSWNSGALTSGVHTFPAVLQSSGLYSLSSVVTVPSSSLGTQTYICNVNH | |
| | KPSNTKVDKKVEPKSCDKTHTCPPCPAPEAAGGPSVFLFPPKPKDTLYITR | |
| | EPEVTCVVVDVSHEDPEVKFNWYVDGVEVHNAKTKPREEQYNSTYRVV | |
| | SVLTVLHQDWLNGKEYKCKVSNKALPAPIEKTISKAKGQPREPQVYTLPP | |
| | SRDELTKNQVSLSCAVKGFYPSDIAVVVWESYGTEWSSYKTTPPVLDSDGS | |
| | FFLVSKLTVTKEEWQQGFVFSCSVMHEALHNHYTQKSLSLSPGK | |
| 328 | EVKLVESGGGLVKPGGSLKLSCAASGFTFSSYGMSWVRQTPEKRLEWVA | ch1C7.HC.CH3C.35. |
| | SISGDGGSYIHYADSVKGRFTISRDSAKNTLYLQMSSLRSEDTALYYCARL | 21 with hole, |
| | PYWGQGTLVTVSAASTKGPSVFPLAPSSKSTSGGTAALGCLVKDYFPEPV | LALAPG, and YTE |
| | TVSWNSGALTSGVHTFPAVLQSSGLYSLSSVVTVPSSSLGTQTYICNVNH | mutations |
| | KPSNTKVDKKVEPKSCDKTHTCPPCPAPEAAGGPSVFLFPPKPKDTLYITR | |
| | EPEVTCVVVDVSHEDPEVKFNWYVDGVEVHNAKTKPREEQYNSTYRVV | |
| | SVLTVLHQDWLNGKEYKCKVSNKALGAPIEKTISKAKGQPREPQVYTLPP | |
| | SRDELTKNQVSLSCAVKGFYPSDIAVVVWESYGTEWSSYKTTPPVLDSDGS | |
| | FFLVSKLTVTKEEWQQGFVFSCSVMHEALHNHYTQKSLSLSPGK | |
| 329 | EVKLVESGGGLVKPGGSLKLSCAASGFTFSSYGMSWVRQTPEKRLEWVA | ch1C7.HC.Fc |
| | SISGDGGSYIHYADSVKGRFTISRDSAKNTLYLQMSSLRSEDTALYYCARL | sequence with hole |
| | PYWGQGTLVTVSAASTKGPSVFPLAPSSKSTSGGTAALGCLVKDYFPEPV | mutations |
| | TVSWNSGALTSGVHTFPAVLQSSGLYSLSSVVTVPSSSLGTQTYICNVNH | |
| | KPSNTKVDKKVEPKSCDKTHTCPPCPAPELLGGPSVFLFPPKPKDTLMISR | |
| | TPEVTCVVVDVSHEDPEVKFNWYVDGVEVHNAKTKPREEQYNSTYRVV | |
| | SVLTVLHQDWLNGKEYKCKVSNKALPAPIEKTISKAKGQPREPQVYTLPP | |
| | SRDELTKNQVSLSCAVKGFYPSDIAVEWESNGQPENNYKTTPPVLDSDGS | |
| | FFLVSKLTVDKSRWQQGNVFSCSVMHEALHNHYTQKSLSLSPGK | |
| 330 | EVKLVESGGGLVKPGGSLKLSCAASGFTFSSYGMSWVRQTPEKRLEWVA | ch1C7.HC.Fc |
| | SISGDGGSYIHYADSVKGRFTISRDSAKNTLYLQMSSLRSEDTALYYCARL | sequence with hole |
| | PYWGQGTLVTVSAASTKGPSVFPLAPSSKSTSGGTAALGCLVKDYFPEPV | and LALA mutations |
| | TVSWNSGALTSGVHTFPAVLQSSGLYSLSSVVTVPSSSLGTQTYICNVNH | |
| | KPSNTKVDKKVEPKSCDKTHTCPPCPAPEAAGGPSVFLFPPKPKDTLMISR | |
| | TPEVTCVVVDVSHEDPEVKFNWYVDGVEVHNAKTKPREEQYNSTYRVV | |
| | SVLTVLHQDWLNGKEYKCKVSNKALPAPIEKTISKAKGQPREPQVYTLPP | |
| | SRDELTKNQVSLSCAVKGFYPSDIAVEWESNGQPENNYKTTPPVLDSDGS | |
| | FFLVSKLTVDKSRWQQGNVFSCSVMHEALHNHYTQKSLSLSPGK | |
| 331 | EVKLVESGGGLVKPGGSLKLSCAASGFTFSSYGMSWVRQTPEKRLEWVA | ch1C7.HC.Fc |
| | SISGDGGSYIHYADSVKGRFTISRDSAKNTLYLQMSSLRSEDTALYYCARL | sequence with hole |
| | PYWGQGTLVTVSAASTKGPSVFPLAPSSKSTSGGTAALGCLVKDYFPEPV | and YTE mutations |
| | TVSWNSGALTSGVHTFPAVLQSSGLYSLSSVVTVPSSSLGTQTYICNVNH | |
| | KPSNTKVDKKVEPKSCDKTHTCPPCPAPELLGGPSVFLFPPKPKDTLYITR | |
| | EPEVTCVVVDVSHEDPEVKFNWYVDGVEVHNAKTKPREEQYNSTYRVV | |
| | SVLTVLHQDWLNGKEYKCKVSNKALPAPIEKTISKAKGQPREPQVYTLPP | |
| | SRDELTKNQVSLSCAVKGFYPSDIAVEWESNGQPENNYKTTPPVLDSDGS | |
| | FFLVSKLTVDKSRWQQGNVFSCSVMHEALHNHYTQKSLSLSPGK | |
| 332 | EVKLVESGGGLVKPGGSLKLSCAASGFTFSSYGMSWVRQTPEKRLEWVA | ch1C7.HC.Fc |
| | SISGDGGSYIHYADSVKGRFTISRDSAKNTLYLQMSSLRSEDTALYYCARL | sequence with hole, |
| | PYWGQGTLVTVSAASTKGPSVFPLAPSSKSTSGGTAALGCLVKDYFPEPV | LALA, and YTE |
| | TVSWNSGALTSGVHTFPAVLQSSGLYSLSSVVTVPSSSLGTQTYICNVNH | mutations |
| | KPSNTKVDKKVEPKSCDKTHTCPPCPAPEAAGGPSVFLFPPKPKDTLYITR | |
| | EPEVTCVVVDVSHEDPEVKFNWYVDGVEVHNAKTKPREEQYNSTYRVV | |
| | SVLTVLHQDWLNGKEYKCKVSNKALPAPIEKTISKAKGQPREPQVYTLPP | |
| | SRDELTKNQVSLSCAVKGFYPSDIAVEWESNGQPENNYKTTPPVLDSDGS | |
| | FFLVSKLTVDKSRWQQGNVFSCSVMHEALHNHYTQKSLSLSPGK | |
| 333 | EVKLVESGGGLVKPGGSLKLSCAASGFTFSSYGMSWVRQTPEKRLEWVA | ch1C7.HC.Fc |
| | SISGDGGSYIHYADSVKGRFTISRDSAKNTLYLQMSSLRSEDTALYYCARL | sequence with hole, |
| | PYWGQGTLVTVSAASTKGPSVFPLAPSSKSTSGGTAALGCLVKDYFPEPV | LALAPG, and YTE |
| | TVSWNSGALTSGVHTFPAVLQSSGLYSLSSVVTVPSSSLGTQTYICNVNH | mutations |
| | KPSNTKVDKKVEPKSCDKTHTCPPCPAPEAAGGPSVFLFPPKPKDTLYITR | |
| | EPEVTCVVVDVSHEDPEVKFNWYVDGVEVHNAKTKPREEQYNSTYRVV | |
| | SVLTVLHQDWLNGKEYKCKVSNKALGAPIEKTISKAKGQPREPQVYTLPP | |
| | SRDELTKNQVSLSCAVKGFYPSDIAVEWESNGQPENNYKTTPPVLDSDGS | |
| | FFLVSKLTVDKSRWQQGNVFSCSVMHEALHNHYTQKSLSLSPGK | |
| 334 | EVKLVESGGGLVKPGGSLKLSCAASGFTFSSYGMSWVRQTPEKRLEWVA | ch1C7.HC.Fc |
| | SISGDGGSYIHYADSVKGRFTISRDSAKNTLYLQMSSLRSEDTALYYCARL | sequence with knob |
| | PYWGQGTLVTVSAASTKGPSVFPLAPSSKSTSGGTAALGCLVKDYFPEPV | mutation |
| | TVSWNSGALTSGVHTFPAVLQSSGLYSLSSVVTVPSSSLGTQTYICNVNH | |
| | KPSNTKVDKKVEPKSCDKTHTCPPCPAPELLGGPSVFLFPPKPKDTLMISR | |
| | TPEVTCVVVDVSHEDPEVKFNWYVDGVEVHNAKTKPREEQYNSTYRVV | |
| | SVLTVLHQDWLNGKEYKCKVSNKALPAPIEKTISKAKGQPREPQVYTLPP | |
| | SRDELTKNQVSLWCLVKGFYPSDIAVEWESNGQPENNYKTTPPVLDSDGS | |
| | FFLYSKLTVDKSRWQQGNVFSCSVMHEALHNHYTQKSLSLSPGK | |
| 335 | EVKLVESGGGLVKPGGSLKLSCAASGFTFSSYGMSWVRQTPEKRLEWVA | ch1C7.HC.Fc |
| | SISGDGGSYIHYADSVKGRFTISRDSAKNTLYLQMSSLRSEDTALYYCARL | sequence with knob |
| | PYWGQGTLVTVSAASTKGPSVFPLAPSSKSTSGGTAALGCLVKDYFPEPV | and LALA mutations |
| | TVSWNSGALTSGVHTFPAVLQSSGLYSLSSVVTVPSSSLGTQTYICNVNH | |
| | KPSNTKVDKKVEPKSCDKTHTCPPCPAPEAAGGPSVFLFPPKPKDTLMISR | |
| | TPEVTCVVVDVSHEDPEVKFNWYVDGVEVHNAKTKPREEQYNSTYRVV | |
| | SVLTVLHQDWLNGKEYKCKVSNKALPAPIEKTISKAKGQPREPQVYTLPP | |
| | SRDELTKNQVSLWCLVKGFYPSDIAVEWESNGQPENNYKTTPPVLDSDGS | |
| | FFLYSKLTVDKSRWQQGNVFSCSVMHEALHNHYTQKSLSLSPGK | |
| 336 | EVKLVESGGGLVKPGGSLKLSCAASGFTFSSYGMSWVRQTPEKRLEWVA | ch1C7.HC.Fc |
| | SISGDGGSYIHYADSVKGRFTISRDSAKNTLYLQMSSLRSEDTALYYCARL | sequence with knob |
| | PYWGQGTLVTVSAASTKGPSVFPLAPSSKSTSGGTAALGCLVKDYFPEPV | and LALAPG |
| | TVSWNSGALTSGVHTFPAVLQSSGLYSLSSVVTVPSSSLGTQTYICNVNH | mutations |
| | KPSNTKVDKKVEPKSCDKTHTCPPCPAPEAAGGPSVFLFPPKPKDTLMISR | |
| | TPEVTCVVVDVSHEDPEVKFNWYVDGVEVHNAKTKPREEQYNSTYRVV | |
| | SVLTVLHQDWLNGKEYKCKVSNKALGAPIEKTISKAKGQPREPQVYTLPP | |
| | SRDELTKNQVSLWCLVKGFYPSDIAVEWESNGQPENNYKTTPPVLDSDGS | |
| | FFLYSKLTVDKSRWQQGNVFSCSVMHEALHNHYTQKSLSLSPGK | |
| 337 | EVKLVESGGGLVKPGGSLKLSCAASGFTFSSYGMSWVRQTPEKRLEWVA | ch1C7.HC.Fc |
| | SISGDGGSYIHYADSVKGRFTISRDSAKNTLYLQMSSLRSEDTALYYCARL | sequence with knob |
| | PYWGQGTLVTVSAASTKGPSVFPLAPSSKSTSGGTAALGCLVKDYFPEPV | and YTE mutations |
| | TVSWNSGALTSGVHTFPAVLQSSGLYSLSSVVTVPSSSLGTQTYICNVNH | |
| | KPSNTKVDKKVEPKSCDKTHTCPPCPAPELLGGPSVFLFPPKPKDTLYITR | |
| | EPEVTCVVVDVSHEDPEVKFNWYVDGVEVHNAKTKPREEQYNSTYRVV | |
| | SVLTVLHQDWLNGKEYKCKVSNKALPAPIEKTISKAKGQPREPQVYTLPP | |
| | SRDELTKNQVSLWCLVKGFYPSDIAVEWESNGQPENNYKTTPPVLDSDGS | |
| | FFLYSKLTVDKSRWQQGNVFSCSVMHEALHNHYTQKSLSLSPGK | |
| 338 | EVKLVESGGGLVKPGGSLKLSCAASGFTFSSYGMSWVRQTPEKRLEWVA | ch1C7.HC.Fc |
| | SISGDGGSYIHYADSVKGRFTISRDSAKNTLYLQMSSLRSEDTALYYCARL | sequence with knob, |
| | PYWGQGTLVTVSAASTKGPSVFPLAPSSKSTSGGTAALGCLVKDYFPEPV | LALA, and YTE |
| | TVSWNSGALTSGVHTFPAVLQSSGLYSLSSVVTVPSSSLGTQTYICNVNH | mutations |
| | KPSNTKVDKKVEPKSCDKTHTCPPCPAPEAAGGPSVFLFPPKPKDTLYITR | |
| | EPEVTCVVVDVSHEDPEVKFNWYVDGVEVHNAKTKPREEQYNSTYRVV | |
| | SVLTVLHQDWLNGKEYKCKVSNKALPAPIEKTISKAKGQPREPQVYTLPP | |
| | SRDELTKNQVSLWCLVKGFYPSDIAVEWESNGQPENNYKTTPPVLDSDGS | |
| | FFLYSKLTVDKSRWQQGNVFSCSVMHEALHNHYTQKSLSLSPGK | |
| 339 | EVKLVESGGGLVKPGGSLKLSCAASGFTFSSYGMSWVRQTPEKRLEWVA | ch1C7.HC.Fc |
| | SISGDGGSYIHYADSVKGRFTISRDSAKNTLYLQMSSLRSEDTALYYCARL | sequence with knob, |
| | PYWGQGTLVTVSAASTKGPSVFPLAPSSKSTSGGTAALGCLVKDYFPEPV | LALAPG, and YTE |
| | TVSWNSGALTSGVHTFPAVLQSSGLYSLSSVVTVPSSSLGTQTYICNVNH | mutations |
| | KPSNTKVDKKVEPKSCDKTHTCPPCPAPEAAGGPSVFLFPPKPKDTLYITR | |
| | EPEVTCVVVDVSHEDPEVKFNWYVDGVEVHNAKTKPREEQYNSTYRVV | |
| | SVLTVLHQDWLNGKEYKCKVSNKALGAPIEKTISKAKGQPREPQVYTLPP | |
| | SRDELTKNQVSLWCLVKGFYPSDIAVEWESNGQPENNYKTTPPVLDSDGS | |
| | FFLYSKLTVDKSRWQQGNVFSCSVMHEALHNHYTQKSLSLSPGK | |
| 340 | APEAAGGPSVFLFPPKPKDTLYITREPEVTCVVVDVSHEDPEVKFNWYVD | Clone CH3C.35.8 |
| | GVEVHNAKTKPREEQYNSTYRVVSVLTVLHQDWLNGKEYKCKVSNKAL | (Clone CH3C.35.20 |
| | GAPIEKTISKAKGQPREPQVYTLPPSRDELTKNQVSLTCLVKGFYPSDIAV | with YTE and |
| | EWESYGTEWSSYKTTPPVLDSDGSFFLYSKLTVTKEEWQQGFVFSCSVM | LALAPG mutations) |
| | HEALHNHYTQKSLSLSPGK | |
| 341 | APEAAGGPSVFLFPPKPKDTLYITREPEVTCVVVDVSHEDPEVKFNWYVD | Clone CH3C.35.9 |
| | GVEVHNAKTKPREEQYNSTYRVVSVLTVLHQDWLNGKEYKCKVSNKAL | (Clone CH3C.35.21 |
| | GAPIEKTISKAKGQPREPQVYTLPPSRDELTKNQVSLTCLVKGFYPSDIAV | with YTE and |
| | EWESFGTEWSSYKTTPPVLDSDGSFFLYSKLTVTKEEWQQGFVFSCSVMH | LALAPG mutations) |
| | EALHNHYTQKSLSLSPGK | |
| 342 | APELLGGPSVFLFPPKPKDTLMISRTPEVTCVVVDVSHEDPEVKFNWYVD | Clone CH3C.35.20.1 |
| | GVEVHNAKTKPREEQYNSTYRVVSVLTVLHQDWLNGKEYKCKVSNKAL | with knob mutation |
| | PAPIEKTISKAKGQPREPQVYTLPPSRDELTKNQVSLWCLVKGFYPSDIAV | |
| | EWESFGTEWSSYKTTPPVLDSDGSFFLYSKLTVTKEEWQQGFVFSCSVMH | |
| | EALHNHYTQKSLSLSPGK | |
| 343 | APEAAGGPSVFLFPPKPKDTLMISRTPEVTCVVVDVSHEDPEVKFNWYVD | Clone CH3C.35.20.1 |
| | GVEVHNAKTKPREEQYNSTYRVVSVLTVLHQDWLNGKEYKCKVSNKAL | with knob and LALA |
| | PAPIEKTISKAKGQPREPQVYTLPPSRDELTKNQVSLWCLVKGFYPSDIAV | mutations |
| | EWESFGTEWSSYKTTPPVLDSDGSFFLYSKLTVTKEEWQQGFVFSCSVMH | |
| | EALHNHYTQKSLSLSPGK | |
| 344 | APEAAGGPSVFLFPPKPKDTLMISRTPEVTCVVVDVSHEDPEVKFNWYVD | Clone CH3C.35.20.1 |
| | GVEVHNAKTKPREEQYNSTYRVVSVLTVLHQDWLNGKEYKCKVSNKAL | with knob and |
| | GAPIEKTISKAKGQPREPQVYTLPPSRDELTKNQVSLWCLVKGFYPSDIAV | LALAPG mutations |
| | EWESFGTEWSSYKTTPPVLDSDGSFFLYSKLTVTKEEWQQGFVFSCSVMH | |
| | EALHNHYTQKSLSLSPGK | |
| 345 | APELLGGPSVFLFPPKPKDTLYITREPEVTCVVVDVSHEDPEVKFNWYVD | Clone CH3C.35.20.1 |
| | GVEVHNAKTKPREEQYNSTYRVVSVLTVLHQDWLNGKEYKCKVSNKAL | with knob and YTE |
| | PAPIEKTISKAKGQPREPQVYTLPPSRDELTKNQVSLWCLVKGFYPSDIAV | mutations |
| | EWESFGTEWSSYKTTPPVLDSDGSFFLYSKLTVTKEEWQQGFVFSCSVMH | |
| | EALHNHYTQKSLSLSPGK | |
| 346 | APEAAGGPSVFLFPPKPKDTLYITREPEVTCVVVDVSHEDPEVKFNWYVD | Clone CH3C.35.20.1 |
| | GVEVHNAKTKPREEQYNSTYRVVSVLTVLHQDWLNGKEYKCKVSNKAL | with knob, LALA, |
| | PAPIEKTISKAKGQPREPQVYTLPPSRDELTKNQVSLWCLVKGFYPSDIAV | and YTE mutations |
| | EWESFGTEWSSYKTTPPVLDSDGSFFLYSKLTVTKEEWQQGFVFSCSVMH | |
| | EALHNHYTQKSLSLSPGK | |
| 347 | APEAAGGPSVFLFPPKPKDTLYITREPEVTCVVVDVSHEDPEVKFNWYVD | Clone CH3C.35.20.1 |
| | GVEVHNAKTKPREEQYNSTYRVVSVLTVLHQDWLNGKEYKCKVSNKAL | with knob, LALAPG, |
| | GAPIEKTISKAKGQPREPQVYTLPPSRDELTKNQVSLWCLVKGFYPSDIAV | and YTE mutations |
| | EWESFGTEWSSYKTTPPVLDSDGSFFLYSKLTVTKEEWQQGFVFSCSVMH | |
| | EALHNHYTQKSLSLSPGK | |
| 348 | APELLGGPSVFLFPPKPKDTLMISRTPEVTCVVVDVSHEDPEVKFNWYVD | Clone CH3C.35.20.1 |
| | GVEVHNAKTKPREEQYNSTYRVVSVLTVLHQDWLNGKEYKCKVSNKAL | with hole mutations |
| | PAPIEKTISKAKGQPREPQVYTLPPSRDELTKNQVSLSCAVKGFYPSDIAVE | |
| | WESFGTEWSSYKTTPPVLDSDGSFFLVSKLTVTKEEWQQGFVFSCSVMHE | |
| | ALHNHYTQKSLSLSPGK | |
| 349 | APEAAGGPSVFLFPPKPKDTLMISRTPEVTCVVVDVSHEDPEVKFNWYVD | Clone CH3C.35.20.1 |
| | GVEVHNAKTKPREEQYNSTYRVVSVLTVLHQDWLNGKEYKCKVSNKAL | with hole and LALA |
| | PAPIEKTISKAKGQPREPQVYTLPPSRDELTKNQVSLSCAVKGFYPSDIAVE | mutations |
| | WESFGTEWSSYKTTPPVLDSDGSFFLVSKLTVTKEEWQQGFVFSCSVMHE | |
| | ALHNHYTQKSLSLSPGK | |
| 350 | APEAAGGPSVFLFPPKPKDTLMISRTPEVTCVVVDVSHEDPEVKFNWYVD | Clone CH3C.35.20.1 |
| | GVEVHNAKTKPREEQYNSTYRVVSVLTVLHQDWLNGKEYKCKVSNKAL | with hole and |
| | GAPIEKTISKAKGQPREPQVYTLPPSRDELTKNQVSLSCAVKGFYPSDIAV | LALAPG mutations |
| | EWESFGTEWSSYKTTPPVLDSDGSFFLVSKLTVTKEEWQQGFVFSCSVMH | |
| | EALHNHYTQKSLSLSPGK | |
| 351 | APELLGGPSVFLFPPKPKDTLYITREPEVTCVVVDVSHEDPEVKFNWYVD | Clone CH3C.35.20.1 |
| | GVEVHNAKTKPREEQYNSTYRVVSVLTVLHQDWLNGKEYKCKVSNKAL | with hole and YTE |
| | PAPIEKTISKAKGQPREPQVYTLPPSRDELTKNQVSLSCAVKGFYPSDIAVE | mutations |
| | WESFGTEWSSYKTTPPVLDSDGSFFLVSKLTVTKEEWQQGFVFSCSVMHE | |
| | ALHNHYTQKSLSLSPGK | |
| 352 | APEAAGGPSVFLFPPKPKDTLYITREPEVTCVVVDVSHEDPEVKFNWYVD | Clone CH3C.35.20.1 |
| | GVEVHNAKTKPREEQYNSTYRVVSVLTVLHQDWLNGKEYKCKVSNKAL | with hole, LALA, and |
| | PAPIEKTISKAKGQPREPQVYTLPPSRDELTKNQVSLSCAVKGFYPSDIAVE | YTE, mutations |
| | WESFGTEWSSYKTTPPVLDSDGSFFLVSKLTVTKEEWQQGFVFSCSVMHE | |
| | ALHNHYTQKSLSLSPGK | |
| 353 | APEAAGGPSVFLFPPKPKDTLYITREPEVTCVVVDVSHEDPEVKFNWYVD | Clone CH3C.35.20.1 |
| | GVEVHNAKTKPREEQYNSTYRVVSVLTVLHQDWLNGKEYKCKVSNKAL | with hole, LALAPG, |
| | GAPIEKTISKAKGQPREPQVYTLPPSRDELTKNQVSLSCAVKGFYPSDIAV | and YTE mutations |
| | EWESFGTEWSSYKTTPPVLDSDGSFFLVSKLTVTKEEWQQGFVFSCSVMH | |
| | EALHNHYTQKSLSLSPGK | |
| 354 | APELLGGPSVFLFPPKPKDTLMISRTPEVTCVVVDVSHEDPEVKFNWYVD | Clone CH3C.35.23.2 |
| | GVEVHNAKTKPREEQYNSTYRVVSVLTVLHQDWLNGKEYKCKVSNKAL | with knob mutation |
| | PAPIEKTISKAKGQPREPQVYTLPPSRDELTKNQVSLWCLVKGFYPSDIAV | |
| | EWESYGTEWANYKTTPPVLDSDGSFFLYSKLTVTKEEWQQGFVFSCSVM | |
| | HEALHNHYTQKSLSLSPGK | |
| 355 | APEAAGGPSVFLFPPKPKDTLMISRTPEVTCVVVDVSHEDPEVKFNWYVD | Clone CH3C.35.23.2 |
| | GVEVHNAKTKPREEQYNSTYRVVSVLTVLHQDWLNGKEYKCKVSNKAL | with knob and LALA |
| | PAPIEKTISKAKGQPREPQVYTLPPSRDELTKNQVSLWCLVKGFYPSDIAV | mutations |
| | EWESYGTEWANYKTTPPVLDSDGSFFLYSKLTVTKEEWQQGFVFSCSVM | |
| | HEALHNHYTQKSLSLSPGK | |
| | APEAAGGPSVFLFPPKPKDTLMISRTPEVTCVVVDVSHEDPEVKFNWYVD | |
| | GVEVHNAKTKPREEQYNSTYRVVSVLTVLHQDWLNGKEYKCKVSNKAL | Clone CH3C.35.23.2 |
| 356 | GAPIEKTISKAKGQPREPQVYTLPPSRDELTKNQVSLWCLVKGFYPSDIAV | with knob and |
| | EWESYGTEWANYKTTPPVLDSDGSFFLYSKLTVTKEEWQQGFVFSCSVM | LALAPG mutations |
| | HEALHNHYTQKSLSLSPGK | |
| 357 | APELLGGPSVFLFPPKPKDTLYITREPEVTCVVVDVSHEDPEVKFNWYVD | Clone CH3C.35.23.2 |
| | GVEVHNAKTKPREEQYNSTYRVVSVLTVLHQDWLNGKEYKCKVSNKAL | with knob and YTE |
| | PAPIEKTISKAKGQPREPQVYTLPPSRDELTKNQVSLWCLVKGFYPSDIAV | mutations |
| | EWESYGTEWANYKTTPPVLDSDGSFFLYSKLTVTKEEWQQGFVFSCSVM | |
| | HEALHNHYTQKSLSLSPGK | |
| 358 | APEAAGGPSVFLFPPKPKDTLYITREPEVTCVVVDVSHEDPEVKFNWYVD | Clone CH3C.35.23.2 |
| | GVEVHNAKTKPREEQYNSTYRVVSVLTVLHQDWLNGKEYKCKVSNKAL | with knob, LALA, |
| | PAPIEKTISKAKGQPREPQVYTLPPSRDELTKNQVSLWCLVKGFYPSDIAV | and YTE mutations |
| | EWESYGTEWANYKTTPPVLDSDGSFFLYSKLTVTKEEWQQGFVFSCSVM | |
| | HEALHNHYTQKSLSLSPGK | |
| 359 | APEAAGGPSVFLFPPKPKDTLYITREPEVTCVVVDVSHEDPEVKFNWYVD | Clone CH3C.35.23.2 |
| | GVEVHNAKTKPREEQYNSTYRVVSVLTVLHQDWLNGKEYKCKVSNKAL | with knob, LALAPG, |
| | GAPIEKTISKAKGQPREPQVYTLPPSRDELTKNQVSLWCLVKGFYPSDIAV | and YTE mutations |
| | EWESYGTEWANYKTTPPVLDSDGSFFLYSKLTVTKEEWQQGFVFSCSVM | |
| | HEALHNHYTQKSLSLSPGK | |
| 360 | APELLGGPSVFLFPPKPKDTLMISRTPEVTCVVVDVSHEDPEVKFNWYVD | Clone CH3C.35.23.2 |
| | GVEVHNAKTKPREEQYNSTYRVVSVLTVLHQDWLNGKEYKCKVSNKAL | with hole mutations |
| | PAPIEKTISKAKGQPREPQVYTLPPSRDELTKNQVSLSCAVKGFYPSDIAVE | |
| | WESYGTEWANYKTTPPVLDSDGSFFLVSKLTVTKEEWQQGFVFSCSVMH | |
| | EALHNHYTQKSLSLSPGK | |
| 361 | APEAAGGPSVFLFPPKPKDTLMISRTPEVTCVVVDVSHEDPEVKFNWYVD | Clone CH3C.35.23.2 |
| | GVEVHNAKTKPREEQYNSTYRVVSVLTVLHQDWLNGKEYKCKVSNKAL | with hole and LALA |
| | PAPIEKTISKAKGQPREPQVYTLPPSRDELTKNQVSLSCAVKGFYPSDIAVE | mutations |
| | WESYGTEWANYKTTPPVLDSDGSFFLVSKLTVTKEEWQQGFVFSCSVMH | |
| | EALHNHYTQKSLSLSPGK | |
| 362 | APEAAGGPSVFLFPPKPKDTLMISRTPEVTCVVVDVSHEDPEVKFNWYVD | Clone CH3C.35.23.2 |
| | GVEVHNAKTKPREEQYNSTYRVVSVLTVLHQDWLNGKEYKCKVSNKAL | with hole and |
| | GAPIEKTISKAKGQPREPQVYTLPPSRDELTKNQVSLSCAVKGFYPSDIAV | LALAPG mutations |
| | EWESYGTEWANYKTTPPVLDSDGSFFLVSKLTVTKEEWQQGFVFSCSVM | |
| | HEALHNHYTQKSLSLSPGK | |
| 363 | APELLGGPSVFLFPPKPKDTLYITREPEVTCVVVDVSHEDPEVKFNWYVD | Clone CH3C.35.23.2 |
| | GVEVHNAKTKPREEQYNSTYRVVSVLTVLHQDWLNGKEYKCKVSNKAL | with hole and YTE |
| | PAPIEKTISKAKGQPREPQVYTLPPSRDELTKNQVSLSCAVKGFYPSDIAVE | mutations |
| | WESYGTEWANYKTTPPVLDSDGSFFLVSKLTVTKEEWQQGFVFSCSVMH | |
| | EALHNHYTQKSLSLSPGK | |
| 364 | APEAAGGPSVFLFPPKPKDTLYITREPEVTCVVVDVSHEDPEVKFNWYVD | Clone CH3C.35.23.2 |
| | GVEVHNAKTKPREEQYNSTYRVVSVLTVLHQDWLNGKEYKCKVSNKAL | with hole, LALA, and |
| | PAPIEKTISKAKGQPREPQVYTLPPSRDELTKNQVSLSCAVKGFYPSDIAVE | YTE mutations |
| | WESYGTEWANYKTTPPVLDSDGSFFLVSKLTVTKEEWQQGFVFSCSVMH | |
| | EALHNHYTQKSLSLSPGK | |
| 365 | APEAAGGPSVFLFPPKPKDTLYITREPEVTCVVVDVSHEDPEVKFNWYVD | Clone CH3C.35.23.2 |
| | GVEVHNAKTKPREEQYNSTYRVVSVLTVLHQDWLNGKEYKCKVSNKAL | with hole, LALAPG, |
| | GAPIEKTISKAKGQPREPQVYTLPPSRDELTKNQVSLSCAVKGFYPSDIAV | and YTE mutations |
| | EWESYGTEWANYKTTPPVLDSDGSFFLVSKLTVTKEEWQQGFVFSCSVM | |
| | HEALHNHYTQKSLSLSPGK | |
| 366 | APELLGGPSVFLFPPKPKDTLMISRTPEVTCVVVDVSHEDPEVKFNWYVD | Clone CH3C.35.23.3 |
| | GVEVHNAKTKPREEQYNSTYRVVSVLTVLHQDWLNGKEYKCKVSNKAL | with knob mutation |
| | PAPIEKTISKAKGQPREPQVYTLPPSRDELTKNQVSLWCLVKGFYPSDIAV | |
| | EWESYGTEWVNYKTTPPVLDSDGSFFLYSKLTVTKEEWQQGFVFSCSVM | |
| | HEALHNHYTQKSLSLSPGK | |
| 367 | APEAAGGPSVFLFPPKPKDTLMISRTPEVTCVVVDVSHEDPEVKFNWYVD | Clone CH3C.35.23.3 |
| | GVEVHNAKTKPREEQYNSTYRVVSVLTVLHQDWLNGKEYKCKVSNKAL | with knob and LALA |
| | PAPIEKTISKAKGQPREPQVYTLPPSRDELTKNQVSLWCLVKGFYPSDIAV | mutations |
| | EWESYGTEWVNYKTTPPVLDSDGSFFLYSKLTVTKEEWQQGFVFSCSVM | |
| | HEALHNHYTQKSLSLSPGK | |
| 368 | APEAAGGPSVFLFPPKPKDTLMISRTPEVTCVVVDVSHEDPEVKFNWYVD | Clone CH3C.35.23.3 |
| | GVEVHNAKTKPREEQYNSTYRVVSVLTVLHQDWLNGKEYKCKVSNKAL | with knob and |
| | GAPIEKTISKAKGQPREPQVYTLPPSRDELTKNQVSLWCLVKGFYPSDIAV | LALAPG mutations |
| | EWESYGTEWVNYKTTPPVLDSDGSFFLYSKLTVTKEEWQQGFVFSCSVM | |
| | HEALHNHYTQKSLSLSPGK | |
| 369 | APELLGGPSVFLFPPKPKDTLYITREPEVTCVVVDVSHEDPEVKFNWYVD | Clone CH3C.35.23.3 |
| | GVEVHNAKTKPREEQYNSTYRVVSVLTVLHQDWLNGKEYKCKVSNKAL | with knob and YTE |
| | PAPIEKTISKAKGQPREPQVYTLPPSRDELTKNQVSLWCLVKGFYPSDIAV | mutations |
| | EWESYGTEWVNYKTTPPVLDSDGSFFLYSKLTVTKEEWQQGFVFSCSVM | |
| | HEALHNHYTQKSLSLSPGK | |
| 370 | APEAAGGPSVFLFPPKPKDTLYITREPEVTCVVVDVSHEDPEVKFNWYVD | Clone CH3C.35.23.3 |
| | GVEVHNAKTKPREEQYNSTYRVVSVLTVLHQDWLNGKEYKCKVSNKAL | with knob, LALA, |
| | PAPIEKTISKAKGQPREPQVYTLPPSRDELTKNQVSLWCLVKGFYPSDIAV | and YTE mutations |
| | EWESYGTEWVNYKTTPPVLDSDGSFFLYSKLTVTKEEWQQGFVFSCSVM | |
| | HEALHNHYTQKSLSLSPGK | |
| 371 | APEAAGGPSVFLFPPKPKDTLYITREPEVTCVVVDVSHEDPEVKFNWYVD | Clone CH3C.35.23.3 |
| | GVEVHNAKTKPREEQYNSTYRVVSVLTVLHQDWLNGKEYKCKVSNKAL | with knob, LALAPG, |
| | GAPIEKTISKAKGQPREPQVYTLPPSRDELTKNQVSLWCLVKGFYPSDIAV | and YTE mutations |
| | EWESYGTEWVNYKTTPPVLDSDGSFFLYSKLTVTKEEWQQGFVFSCSVM | |
| | HEALHNHYTQKSLSLSPGK | |
| 372 | APELLGGPSVFLFPPKPKDTLMISRTPEVTCVVVDVSHEDPEVKFNWYVD | Clone CH3C.3523.3 |
| | GVEVHNAKTKPREEQYNSTYRVVSVLTVLHQDWLNGKEYKCKVSNKAL | with hole mutations |
| | PAPIEKTISKAKGQPREPQVYTLPPSRDELTKNQVSLSCAVKGFYPSDIAVE | |
| | WESYGTEWVNYKTTPPVLDSDGSFFLVSKLTVTKEEWQQGFVFSCSVMH | |
| | EALHNHYTQKSLSLSPGK | |
| 373 | APEAAGGPSVFLFPPKPKDTLMISRTPEVTCVVVDVSHEDPEVKFNWYVD | Clone CH3C.35.23.3 |
| | GVEVHNAKTKPREEQYNSTYRVVSVLTVLHQDWLNGKEYKCKVSNKAL | with hole and LALA |
| | PAPIEKTISKAKGQPREPQVYTLPPSRDELTKNQVSLSCAVKGFYPSDIAVE | mutations |
| | WESYGTEWVNYKTTPPVLDSDGSFFLVSKLTVTKEEWQQGFVFSCSVMH | |
| | EALHNHYTQKSLSLSPGK | |
| 374 | APEAAGGPSVFLFPPKPKDTLMISRTPEVTCVVVDVSHEDPEVKFNWYVD | Clone CH3C.35.23.3 |
| | GVEVHNAKTKPREEQYNSTYRVVSVLTVLHQDWLNGKEYKCKVSNKAL | with hole and |
| | GAPIEKTISKAKGQPREPQVYTLPPSRDELTKNQVSLSCAVKGFYPSDIAV | LALAPG mutations |
| | EWESYGTEWVNYKTTPPVLDSDGSFFLVSKLTVTKEEWQQGFVFSCSVM | |
| | HEALHNHYTQKSLSLSPGK | |
| 375 | APELLGGPSVFLFPPKPKDTLYITREPEVTCVVVDVSHEDPEVKFNWYVD | Clone CH3C.35.23.3 |
| | GVEVHNAKTKPREEQYNSTYRVVSVLTVLHQDWLNGKEYKCKVSNKAL | with hole and YTE |
| | PAPIEKTISKAKGQPREPQVYTLPPSRDELTKNQVSLSCAVKGFYPSDIAVE | mutations |
| | WESYGTEWVNYKTTPPVLDSDGSFFLVSKLTVTKEEWQQGFVFSCSVMH | |
| | EALHNHYTQKSLSLSPGK | |
| 376 | APEAAGGPSVFLFPPKPKDTLYITREPEVTCVVVDVSHEDPEVKFNWYVD | Clone CH3C.35.23.3 |
| | GVEVHNAKTKPREEQYNSTYRVVSVLTVLHQDWLNGKEYKCKVSNKAL | with hole, LALA, and |
| | PAPIEKTISKAKGQPREPQVYTLPPSRDELTKNQVSLSCAVKGFYPSDIAVE | YTE mutations |
| | WESYGTEWVNYKTTPPVLDSDGSFFLVSKLTVTKEEWQQGFVFSCSVMH | |
| | EALHNHYTQKSLSLSPGK | |
| 377 | APEAAGGPSVFLFPPKPKDTLYITREPEVTCVVVDVSHEDPEVKFNWYVD | Clone CH3C.35.23.3 |
| | GVEVHNAKTKPREEQYNSTYRVVSVLTVLHQDWLNGKEYKCKVSNKAL | with hole, LALAPG, |
| | GAPIEKTISKAKGQPREPQVYTLPPSRDELTKNQVSLSCAVKGFYPSDIAV | and YTE mutations |
| | EWESYGTEWVNYKTTPPVLDSDGSFFLVSKLTVTKEEWQQGFVFSCSVM | |
| | HEALHNHYTQKSLSLSPGK | |
| 378 | APELLGGPSVFLFPPKPKDTLMISRTPEVTCVVVDVSHEDPEVKFNWYVD | Clone CH3C.35.23.4 |
| | GVEVHNAKTKPREEQYNSTYRVVSVLTVLHQDWLNGKEYKCKVSNKAL | with knob mutation |
| | PAPIEKTISKAKGQPREPQVYTLPPSRDELTKNQVSLWCLVKGFYPSDIAV | |
| | EWESYGTEWSNYKTTPPVLDSDGSFFLYSKLTVSKEEWQQGFVFSCSVM | |
| | HEALHNHYTQKSLSLSPGK | |
| 379 | APEAAGGPSVFLFPPKPKDTLMISRTPEVTCVVVDVSHEDPEVKFNWYVD | Clone CH3C.35.23.4 |
| | GVEVHNAKTKPREEQYNSTYRVVSVLTVLHQDWLNGKEYKCKVSNKAL | with knob and LALA |
| | PAPIEKTISKAKGQPREPQVYTLPPSRDELTKNQVSLWCLVKGFYPSDIAV | mutations |
| | EWESYGTEWSNYKTTPPVLDSDGSFFLYSKLTVSKEEWQQGFVFSCSVM | |
| | HEALHNHYTQKSLSLSPGK | |
| 380 | APEAAGGPSVFLFPPKPKDTLMISRTPEVTCVVVDVSHEDPEVKFNWYVD | Clone CH3C.35.23.4 |
| | GVEVHNAKTKPREEQYNSTYRVVSVLTVLHQDWLNGKEYKCKVSNKAL | with knob and |
| | GAPIEKTISKAKGQPREPQVYTLPPSRDELTKNQVSLWCLVKGFYPSDIAV | LALAPG mutations |
| | EWESYGTEWSNYKTTPPVLDSDGSFFLYSKLTVSKEEWQQGFVFSCSVM | |
| | HEALHNHYTQKSLSLSPGK | |
| 381 | APELLGGPSVFLFPPKPKDTLYITREPEVTCVVVDVSHEDPEVKFNWYVD | Clone CH3C.35.23.4 |
| | GVEVHNAKTKPREEQYNSTYRVVSVLTVLHQDWLNGKEYKCKVSNKAL | with knob and YTE |
| | PAPIEKTISKAKGQPREPQVYTLPPSRDELTKNQVSLWCLVKGFYPSDIAV | mutations |
| | EWESYGTEWSNYKTTPPVLDSDGSFFLYSKLTVSKEEWQQGFVFSCSVM | |
| | HEALHNHYTQKSLSLSPGK | |
| 382 | APEAAGGPSVFLFPPKPKDTLYITREPEVTCVVVDVSHEDPEVKFNWYVD | Clone CH3C.35.23.4 |
| | GVEVHNAKTKPREEQYNSTYRVVSVLTVLHQDWLNGKEYKCKVSNKAL | with knob, LALA, |
| | PAPIEKTISKAKGQPREPQVYTLPPSRDELTKNQVSLWCLVKGFYPSDIAV | and YTE mutations |
| | EWESYGTEWSNYKTTPPVLDSDGSFFLYSKLTVSKEEWQQGFVFSCSVM | |
| | HEALHNHYTQKSLSLSPGK | |
| 383 | APEAAGGPSVFLFPPKPKDTLYITREPEVTCVVVDVSHEDPEVKFNWYVD | Clone CH3C.35.23.4 |
| | GVEVHNAKTKPREEQYNSTYRVVSVLTVLHQDWLNGKEYKCKVSNKAL | with knob, LALAPG, |
| | GAPIEKTISKAKGQPREPQVYTLPPSRDELTKNQVSLWCLVKGFYPSDIAV | and YTE mutations |
| | EWESYGTEWSNYKTTPPVLDSDGSFFLYSKLTVSKEEWQQGFVFSCSVM | |
| | HEALHNHYTQKSLSLSPGK | |
| 384 | APELLGGPSVFLFPPKPKDTLMISRTPEVTCVVVDVSHEDPEVKFNWYVD | Clone CH3C.3523.4 |
| | GVEVHNAKTKPREEQYNSTYRVVSVLTVLHQDWLNGKEYKCKVSNKAL | with hole mutations |
| | PAPIEKTISKAKGQPREPQVYTLPPSRDELTKNQVSLSCAVKGFYPSDIAVE | |
| | WESYGTEWSNYKTTPPVLDSDGSFFLVSKLTVSKEEWQQGFVFSCSVMH | |
| | EALHNHYTQKSLSLSPGK | |
| 385 | APEAAGGPSVFLFPPKPKDTLMISRTPEVTCVVVDVSHEDPEVKFNWYVD | Clone CH3C.35.23.4 |
| | GVEVHNAKTKPREEQYNSTYRVVSVLTVLHQDWLNGKEYKCKVSNKAL | with hole and LALA |
| | PAPIEKTISKAKGQPREPQVYTLPPSRDELTKNQVSLSCAVKGFYPSDIAVE | mutations |
| | WESYGTEWSNYKTTPPVLDSDGSFFLVSKLTVSKEEWQQGFVFSCSVMH | |
| | EALHNHYTQKSLSLSPGK | |
| 386 | APEAAGGPSVFLFPPKPKDTLMISRTPEVTCVVVDVSHEDPEVKFNWYVD | Clone CH3C.35.23.4 |
| | GVEVHNAKTKPREEQYNSTYRVVSVLTVLHQDWLNGKEYKCKVSNKAL | with hole and |
| | GAPIEKTISKAKGQPREPQVYTLPPSRDELTKNQVSLSCAVKGFYPSDIAV | LALAPG mutations |
| | EWESYGTEWSNYKTTPPVLDSDGSFFLVSKLTVSKEEWQQGFVFSCSVM | |
| | HEALHNHYTQKSLSLSPGK | |
| 387 | APELLGGPSVFLFPPKPKDTLYITREPEVTCVVVDVSHEDPEVKFNWYVD | Clone CH3C.35.23.4 |
| | GVEVHNAKTKPREEQYNSTYRVVSVLTVLHQDWLNGKEYKCKVSNKAL | with hole and YTE |
| | PAPIEKTISKAKGQPREPQVYTLPPSRDELTKNQVSLSCAVKGFYPSDIAVE | mutations |
| | WESYGTEWSNYKTTPPVLDSDGSFFLVSKLTVSKEEWQQGFVFSCSVMH | |
| | EALHNHYTQKSLSLSPGK | |
| 388 | APEAAGGPSVFLFPPKPKDTLYITREPEVTCVVVDVSHEDPEVKFNWYVD | Clone CH3C.35.23.4 |
| | GVEVHNAKTKPREEQYNSTYRVVSVLTVLHQDWLNGKEYKCKVSNKAL | with hole, LALA, and |
| | PAPIEKTISKAKGQPREPQVYTLPPSRDELTKNQVSLSCAVKGFYPSDIAVE | YTE mutations |
| | WESYGTEWSNYKTTPPVLDSDGSFFLVSKLTVSKEEWQQGFVFSCSVMH | |
| | EALHNHYTQKSLSLSPGK | |
| 389 | APEAAGGPSVFLFPPKPKDTLYITREPEVTCVVVDVSHEDPEVKFNWYVD | Clone CH3C.35.23.4 |
| | GVEVHNAKTKPREEQYNSTYRVVSVLTVLHQDWLNGKEYKCKVSNKAL | with hole, LALAPG, |
| | GAPIEKTISKAKGQPREPQVYTLPPSRDELTKNQVSLSCAVKGFYPSDIAV | and YTE mutations |
| | EWESYGTEWSNYKTTPPVLDSDGSFFLVSKLTVSKEEWQQGFVFSCSVM | |
| | HEALHNHYTQKSLSLSPGK | |
| 390 | APELLGGPSVFLFPPKPKDTLMISRTPEVTCVVVDVSHEDPEVKFNWYVD | Clone |
| | GVEVHNAKTKPREEQYNSTYRVVSVLTVLHQDWLNGKEYKCKVSNKAL | CH3C.35.21.17.2 |
| | PAPIEKTISKAKGQPREPQVYTLPPSRDELTKNQVSLWCLVKGFYPSDIAV | with knob mutation |
| | LWESYGTEWASYKTTPPVLDSDGSFFLYSKLTVTKEEWQQGFVFSCSVM | |
| | HEALHNHYTQKSLSLSPGK | |
| 391 | APEAAGGPSVFLFPPKPKDTLMISRTPEVTCVVVDVSHEDPEVKFNWYVD | Clone |
| | GVEVHNAKTKPREEQYNSTYRVVSVLTVLHQDWLNGKEYKCKVSNKAL | CH3C.35.21.17.2 |
| | PAPIEKTISKAKGQPREPQVYTLPPSRDELTKNQVSLWCLVKGFYPSDIAV | with knob and LALA |
| | LWESYGTEWASYKTTPPVLDSDGSFFLYSKLTVTKEEWQQGFVFSCSVM | mutations |
| | HEALHNHYTQKSLSLSPGK | |
| 392 | APEAAGGPSVFLFPPKPKDTLMISRTPEVTCVVVDVSHEDPEVKFNWYVD | Clone |
| | GVEVHNAKTKPREEQYNSTYRVVSVLTVLHQDWLNGKEYKCKVSNKAL | CH3C.35.21.17.2 |
| | GAPIEKTISKAKGQPREPQVYTLPPSRDELTKNQVSLWCLVKGFYPSDIAV | with knob and |
| | LWESYGTEWASYKTTPPVLDSDGSFFLYSKLTVTKEEWQQGFVFSCSVM | LALAPG mutations |
| | HEALHNHYTQKSLSLSPGK | |
| 393 | APELLGGPSVFLFPPKPKDTLYITREPEVTCVVVDVSHEDPEVKFNWYVD | Clone |
| | GVEVHNAKTKPREEQYNSTYRVVSVLTVLHQDWLNGKEYKCKVSNKAL | CH3C.35.21.17.2 |
| | PAPIEKTISKAKGQPREPQVYTLPPSRDELTKNQVSLWCLVKGFYPSDIAV | with knob and YTE |
| | LWESYGTEWASYKTTPPVLDSDGSFFLYSKLTVTKEEWQQGFVFSCSVM | mutations |
| | HEALHNHYTQKSLSLSPGK | |
| 394 | APEAAGGPSVFLFPPKPKDTLYITREPEVTCVVVDVSHEDPEVKFNWYVD | Clone |
| | GVEVHNAKTKPREEQYNSTYRVVSVLTVLHQDWLNGKEYKCKVSNKAL | CH3C.35.21.17.2 |
| | PAPIEKTISKAKGQPREPQVYTLPPSRDELTKNQVSLWCLVKGFYPSDIAV | with knob, LALA, |
| | LWESYGTEWASYKTTPPVLDSDGSFFLYSKLTVTKEEWQQGFVFSCSVM | and YTE mutations |
| | HEALHNHYTQKSLSLSPGK | |
| 395 | APEAAGGPSVFLFPPKPKDTLYITREPEVTCVVVDVSHEDPEVKFNWYVD | Clone |
| | GVEVHNAKTKPREEQYNSTYRVVSVLTVLHQDWLNGKEYKCKVSNKAL | CH3C.35.21.17.2 |
| | GAPIEKTISKAKGQPREPQVYTLPPSRDELTKNQVSLWCLVKGFYPSDIAV | with knob, LALAPG, |
| | LWESYGTEWASYKTTPPVLDSDGSFFLYSKLTVTKEEWQQGFVFSCSVM | and YTE mutations |
| | HEALHNHYTQKSLSLSPGK | |
| 396 | APELLGGPSVFLFPPKPKDTLMISRTPEVTCVVVDVSHEDPEVKFNWYVD | Clone |
| | GVEVHNAKTKPREEQYNSTYRVVSVLTVLHQDWLNGKEYKCKVSNKAL | CH3C.35.21.17.2 |
| | PAPIEKTISKAKGQPREPQVYTLPPSRDELTKNQVSLSCAVKGFYPSDIAVL | with hole mutations |
| | WESYGTEWASYKTTPPVLDSDGSFFLVSKLTVTKEEWQQGFVFSCSVMH | |
| | EALHNHYTQKSLSLSPGK | |
| 397 | APEAAGGPSVFLFPPKPKDTLMISRTPEVTCVVVDVSHEDPEVKFNWYVD | Clone |
| | GVEVHNAKTKPREEQYNSTYRVVSVLTVLHQDWLNGKEYKCKVSNKAL | CH3C.35.21.17.2 |
| | PAPIEKTISKAKGQPREPQVYTLPPSRDELTKNQVSLSCAVKGFYPSDIAVL | with hole and LALA |
| | WESYGTEWASYKTTPPVLDSDGSFFLVSKLTVTKEEWQQGFVFSCSVMH | mutations |
| | EALHNHYTQKSLSLSPGK | |
| 398 | APEAAGGPSVFLFPPKPKDTLMISRTPEVTCVVVDVSHEDPEVKFNWYVD | Clone |
| | GVEVHNAKTKPREEQYNSTYRVVSVLTVLHQDWLNGKEYKCKVSNKAL | CH3C.35.21.17.2 |
| | GAPIEKTISKAKGQPREPQVYTLPPSRDELTKNQVSLSCAVKGFYPSDIAV | with hole and |
| | LWESYGTEWASYKTTPPVLDSDGSFFLVSKLTVTKEEWQQGFVFSCSVM | LALAPG mutations |
| | HEALHNHYTQKSLSLSPGK | |
| 399 | APELLGGPSVFLFPPKPKDTLYITREPEVTCVVVDVSHEDPEVKFNWYVD | Clone |
| | GVEVHNAKTKPREEQYNSTYRVVSVLTVLHQDWLNGKEYKCKVSNKAL | CH3C.35.21.17.2 |
| | PAPIEKTISKAKGQPREPQVYTLPPSRDELTKNQVSLSCAVKGFYPSDIAVL | with hole and YTE |
| | WESYGTEWASYKTTPPVLDSDGSFFLVSKLTVTKEEWQQGFVFSCSVMH | mutations |
| | EALHNHYTQKSLSLSPGK | |
| 400 | APEAAGGPSVFLFPPKPKDTLYITREPEVTCVVVDVSHEDPEVKFNWYVD | Clone |
| | GVEVHNAKTKPREEQYNSTYRVVSVLTVLHQDWLNGKEYKCKVSNKAL | CH3C.35.21.17.2 |
| | PAPIEKTISKAKGQPREPQVYTLPPSRDELTKNQVSLSCAVKGFYPSDIAVL | with hole, LALA, and |
| | WESYGTEWASYKTTPPVLDSDGSFFLVSKLTVTKEEWQQGFVFSCSVMH | YTE mutations |
| | EALHNHYTQKSLSLSPGK | |
| 401 | APEAAGGPSVFLFPPKPKDTLYITREPEVTCVVVDVSHEDPEVKFNWYVD | Clone |
| | GVEVHNAKTKPREEQYNSTYRVVSVLTVLHQDWLNGKEYKCKVSNKAL | CH3C.35.21.17.2 |
| | GAPIEKTISKAKGQPREPQVYTLPPSRDELTKNQVSLSCAVKGFYPSDIAV | with hole, LALAPG, |
| | LWESYGTEWASYKTTPPVLDSDGSFFLVSKLTVTKEEWQQGFVFSCSVM | and YTE mutations |
| | HEALHNHYTQKSLSLSPGK | |
| 402 | APELLGGPSVFLFPPKPKDTLMISRTPEVTCVVVDVSHEDPEVKFNWYVD | Clone CH3C.35.23 |
| | GVEVHNAKTKPREEQYNSTYRVVSVLTVLHQDWLNGKEYKCKVSNKAL | with knob mutation |
| | PAPIEKTISKAKGQPREPQVYTLPPSRDELTKNQVSLWCLVKGFYPSDIAV | |
| | EWESYGTEWSNYKTTPPVLDSDGSFFLYSKLTVTKEEWQQGFVFSCSVM | |
| | HEALHNHYTQKSLSLSPGK | |
| 403 | APEAAGGPSVFLFPPKPKDTLMISRTPEVTCVVVDVSHEDPEVKFNWYVD | Clone CH3C.35.23 |
| | GVEVHNAKTKPREEQYNSTYRVVSVLTVLHQDWLNGKEYKCKVSNKAL | with knob and LALA |
| | PAPIEKTISKAKGQPREPQVYTLPPSRDELTKNQVSLWCLVKGFYPSDIAV | mutations |
| | EWESYGTEWSNYKTTPPVLDSDGSFFLYSKLTVTKEEWQQGFVFSCSVM | |
| | HEALHNHYTQKSLSLSPGK | |
| 404 | APEAAGGPSVFLFPPKPKDTLMISRTPEVTCVVVDVSHEDPEVKFNWYVD | Clone CH3C.35.23 |
| | GVEVHNAKTKPREEQYNSTYRVVSVLTVLHQDWLNGKEYKCKVSNKAL | with knob and |
| | GAPIEKTISKAKGQPREPQVYTLPPSRDELTKNQVSLWCLVKGFYPSDIAV | LALAPG mutations |
| | EWESYGTEWSNYKTTPPVLDSDGSFFLYSKLTVTKEEWQQGFVFSCSVM | |
| | HEALHNHYTQKSLSLSPGK | |
| 405 | APELLGGPSVFLFPPKPKDTLYITREPEVTCVVVDVSHEDPEVKFNWYVD | Clone CH3C.35.23 |
| | GVEVHNAKTKPREEQYNSTYRVVSVLTVLHQDWLNGKEYKCKVSNKAL | with knob and YTE |
| | PAPIEKTISKAKGQPREPQVYTLPPSRDELTKNQVSLWCLVKGFYPSDIAV | mutations |
| | EWESYGTEWSNYKTTPPVLDSDGSFFLYSKLTVTKEEWQQGFVFSCSVM | |
| | HEALHNHYTQKSLSLSPGK | |
| 406 | APEAAGGPSVFLFPPKPKDTLYITREPEVTCVVVDVSHEDPEVKFNWYVD | Clone CH3C.35.23 |
| | GVEVHNAKTKPREEQYNSTYRVVSVLTVLHQDWLNGKEYKCKVSNKAL | with knob, LALA, |
| | PAPIEKTISKAKGQPREPQVYTLPPSRDELTKNQVSLWCLVKGFYPSDIAV | and YTE mutations |
| | EWESYGTEWSNYKTTPPVLDSDGSFFLYSKLTVTKEEWQQGFVFSCSVM | |
| | HEALHNHYTQKSLSLSPGK | |
| 407 | APEAAGGPSVFLFPPKPKDTLYITREPEVTCVVVDVSHEDPEVKFNWYVD | Clone CH3C.35.23 |
| | GVEVHNAKTKPREEQYNSTYRVVSVLTVLHQDWLNGKEYKCKVSNKAL | with knob, LALAPG, |
| | GAPIEKTISKAKGQPREPQVYTLPPSRDELTKNQVSLWCLVKGFYPSDIAV | and YTE mutations |
| | EWESYGTEWSNYKTTPPVLDSDGSFFLYSKLTVTKEEWQQGFVFSCSVM | |
| | HEALHNHYTQKSLSLSPGK | |
| 408 | APELLGGPSVFLFPPKPKDTLMISRTPEVTCVVVDVSHEDPEVKFNWYVD | Clone CH3C.3523 |
| | GVEVHNAKTKPREEQYNSTYRVVSVLTVLHQDWLNGKEYKCKVSNKAL | with hole mutations |
| | PAPIEKTISKAKGQPREPQVYTLPPSRDELTKNQVSLSCAVKGFYPSDIAVE | |
| | WESYGTEWSNYKTTPPVLDSDGSFFLVSKLTVTKEEWQQGFVFSCSVMH | |
| | EALHNHYTQKSLSLSPGK | |
| 409 | APEAAGGPSVFLFPPKPKDTLMISRTPEVTCVVVDVSHEDPEVKFNWYVD | Clone CH3C.35.23 |
| | GVEVHNAKTKPREEQYNSTYRVVSVLTVLHQDWLNGKEYKCKVSNKAL | with hole and LALA |
| | PAPIEKTISKAKGQPREPQVYTLPPSRDELTKNQVSLSCAVKGFYPSDIAVE | mutations |
| | WESYGTEWSNYKTTPPVLDSDGSFFLVSKLTVTKEEWQQGFVFSCSVMH | |
| | EALHNHYTQKSLSLSPGK | |
| 410 | APEAAGGPSVFLFPPKPKDTLMISRTPEVTCVVVDVSHEDPEVKFNWYVD | Clone CH3C.35.23 |
| | GVEVHNAKTKPREEQYNSTYRVVSVLTVLHQDWLNGKEYKCKVSNKAL | with hole and |
| | GAPIEKTISKAKGQPREPQVYTLPPSRDELTKNQVSLSCAVKGFYPSDIAV | LALAPG mutations |
| | EWESYGTEWSNYKTTPPVLDSDGSFFLVSKLTVTKEEWQQGFVFSCSVM | |
| | HEALHNHYTQKSLSLSPGK | |
| 411 | APELLGGPSVFLFPPKPKDTLYITREPEVTCVVVDVSHEDPEVKFNWYVD | Clone CH3C.35.23 |
| | GVEVHNAKTKPREEQYNSTYRVVSVLTVLHQDWLNGKEYKCKVSNKAL | with hole and YTE |
| | PAPIEKTISKAKGQPREPQVYTLPPSRDELTKNQVSLSCAVKGFYPSDIAVE | mutations |
| | WESYGTEWSNYKTTPPVLDSDGSFFLVSKLTVTKEEWQQGFVFSCSVMH | |
| | EALHNHYTQKSLSLSPGK | |
| 412 | APEAAGGPSVFLFPPKPKDTLYITREPEVTCVVVDVSHEDPEVKFNWYVD | Clone CH3C.35.23 |
| | GVEVHNAKTKPREEQYNSTYRVVSVLTVLHQDWLNGKEYKCKVSNKAL | with hole, LALA, and |
| | PAPIEKTISKAKGQPREPQVYTLPPSRDELTKNQVSLSCAVKGFYPSDIAVE | YTE mutations |
| | WESYGTEWSNYKTTPPVLDSDGSFFLVSKLTVTKEEWQQGFVFSCSVMH | |
| | EALHNHYTQKSLSLSPGK | |
| 413 | APEAAGGPSVFLFPPKPKDTLYITREPEVTCVVVDVSHEDPEVKFNWYVD | Clone CH3C.35.23 |
| | GVEVHNAKTKPREEQYNSTYRVVSVLTVLHQDWLNGKEYKCKVSNKAL | with hole, LALAPG, |
| | GAPIEKTISKAKGQPREPQVYTLPPSRDELTKNQVSLSCAVKGFYPSDIAV | and YTE mutations |
| | EWESYGTEWSNYKTTPPVLDSDGSFFLVSKLTVTKEEWQQGFVFSCSVM | |
| | HEALHNHYTQKSLSLSPGK | |
| 414 | EVKLVESGGGLVKPGGSLKLSCAASGFTFSSYGMSWVRQTPEKRLEWVA | ch1C7.HC.CH3C.35. |
| | SISGDGGSYIHYADSVKGRFTISRDSAKNTLYLQMSSLRSEDTALYYCARL | 20.1 |
| | PYWGQGTLVTVSAASTKGPSVFPLAPSSKSTSGGTAALGCLVKDYFPEPV | |
| | TVSWNSGALTSGVHTFPAVLQSSGLYSLSSVVTVPSSSLGTQTYICNVNH | |
| | KPSNTKVDKKVEPKSCDKTHTCPPCPAPELLGGPSVFLFPPKPKDTLMISR | |
| | TPEVTCVVVDVSHEDPEVKFNWYVDGVEVHNAKTKPREEQYNSTYRVV | |
| | SVLTVLHQDWLNGKEYKCKVSNKALPAPIEKTISKAKGQPREPQVYTLPP | |
| | SRDELTKNQVSLTCLVKGFYPSDIAVEWESFGTEWSSYKTTPPVLDSDGSF | |
| | FLYSKLTVTKEEWQQGFVFSCSVMHEALHNHYTQKSLSLSPGK | |
| 415 | EVKLVESGGGLVKPGGSLKLSCAASGFTFSSYGMSWVRQTPEKRLEWVA | ch1C7.HC.CH3C.35. |
| | SISGDGGSYIHYADSVKGRFTISRDSAKNTLYLQMSSLRSEDTALYYCARL | 23.2 |
| | PYWGQGTLVTVSAASTKGPSVFPLAPSSKSTSGGTAALGCLVKDYFPEPV | |
| | TVSWNSGALTSGVHTFPAVLQSSGLYSLSSVVTVPSSSLGTQTYICNVNH | |
| | KPSNTKVDKKVEPKSCDKTHTCPPCPAPELLGGPSVFLFPPKPKDTLMISR | |
| | TPEVTCVVVDVSHEDPEVKFNWYVDGVEVHNAKTKPREEQYNSTYRVV | |
| | SVLTVLHQDWLNGKEYKCKVSNKALPAPIEKTISKAKGQPREPQVYTLPP | |
| | SRDELTKNQVSLTCLVKGFYPSDIAVEWESYGTEWANYKTTPPVLDSDGS | |
| | FFLYSKLTVTKEEWQQGFVFSCSVMHEALHNHYTQKSLSLSPGK | |
| 416 | EVKLVESGGGLVKPGGSLKLSCAASGFTFSSYGMSWVRQTPEKRLEWVA | ch1C7.HC.CH3C.35. |
| | SISGDGGSYIHYADSVKGRFTISRDSAKNTLYLQMSSLRSEDTALYYCARL | 23.3 |
| | PYWGQGTLVTVSAASTKGPSVFPLAPSSKSTSGGTAALGCLVKDYFPEPV | |
| | TVSWNSGALTSGVHTFPAVLQSSGLYSLSSVVTVPSSSLGTQTYICNVNH | |
| | KPSNTKVDKKVEPKSCDKTHTCPPCPAPELLGGPSVFLFPPKPKDTLMISR | |
| | TPEVTCVVVDVSHEDPEVKFNWYVDGVEVHNAKTKPREEQYNSTYRVV | |
| | SVLTVLHQDWLNGKEYKCKVSNKALPAPIEKTISKAKGQPREPQVYTLPP | |
| | SRDELTKNQVSLTCLVKGFYPSDIAVEWESYGTEWVNYKTTPPVLDSDGS | |
| | FFLYSKLTVTKEEWQQGFVFSCSVMHEALHNHYTQKSLSLSPGK | |
| 417 | EVKLVESGGGLVKPGGSLKLSCAASGFTFSSYGMSWVRQTPEKRLEWVA | ch1C7.HC.CH3C.35. |
| | SISGDGGSYIHYADSVKGRFTISRDSAKNTLYLQMSSLRSEDTALYYCARL | 23.4 |
| | PYWGQGTLVTVSAASTKGPSVFPLAPSSKSTSGGTAALGCLVKDYFPEPV | |
| | TVSWNSGALTSGVHTFPAVLQSSGLYSLSSVVTVPSSSLGTQTYICNVNH | |
| | KPSNTKVDKKVEPKSCDKTHTCPPCPAPELLGGPSVFLFPPKPKDTLMISR | |
| | TPEVTCVVVDVSHEDPEVKFNWYVDGVEVHNAKTKPREEQYNSTYRVV | |
| | SVLTVLHQDWLNGKEYKCKVSNKALPAPIEKTISKAKGQPREPQVYTLPP | |
| | SRDELTKNQVSLTCLVKGFYPSDIAVEWESYGTEWSNYKTTPPVLDSDGS | |
| | FFLYSKLTVSKEEWQQGFVFSCSVMHEALHNHYTQKSLSLSPGK | |
| 418 | EVKLVESGGGLVKPGGSLKLSCAASGFTFSSYGMSWVRQTPEKRLEWVA | ch1C7.HC.CH3C.35. |
| | SISGDGGSYIHYADSVKGRFTISRDSAKNTLYLQMSSLRSEDTALYYCARL | |
| | PYWGQGTLVTVSAASTKGPSVFPLAPSSKSTSGGTAALGCLVKDYFPEPV | |
| | TVSWNSGALTSGVHTFPAVLQSSGLYSLSSVVTVPSSSLGTQTYICNVNH | |
| | KPSNTKVDKKVEPKSCDKTHTCPPCPAPELLGGPSVFLFPPKPKDTLMISR | |
| | TPEVTCVVVDVSHEDPEVKFNWYVDGVEVHNAKTKPREEQYNSTYRVV | |
| | SVLTVLHQDWLNGKEYKCKVSNKALPAPIEKTISKAKGQPREPQVYTLPP | |
| | SRDELTKNQVSLTCLVKGFYPSDIAVLWESYGTEWASYKTTPPVLDSDGS | |
| | FFLYSKLTVTKEEWQQGFVFSCSVMHEALHNHYTQKSLSLSPGK | |
| 419 | EVKLVESGGGLVKPGGSLKLSCAASGFTFSSYGMSWVRQTPEKRLEWVA | ch1C7.HC.CH3C.35. |
| | SISGDGGSYIHYADSVKGRFTISRDSAKNTLYLQMSSLRSEDTALYYCARL | 23 |
| | PYWGQGTLVTVSAASTKGPSVFPLAPSSKSTSGGTAALGCLVKDYFPEPV | |
| | TVSWNSGALTSGVHTFPAVLQSSGLYSLSSVVTVPSSSLGTQTYICNVNH | |
| | KPSNTKVDKKVEPKSCDKTHTCPPCPAPELLGGPSVFLFPPKPKDTLMISR | |
| | TPEVTCVVVDVSHEDPEVKFNWYVDGVEVHNAKTKPREEQYNSTYRVV | |
| | SVLTVLHQDWLNGKEYKCKVSNKALPAPIEKTISKAKGQPREPQVYTLPP | |
| | SRDELTKNQVSLTCLVKGFYPSDIAVEWESYGTEWSNYKTTPPVLDSDGS | |
| | FFLYSKLTVTKEEWQQGFVFSCSVMHEALHNHYTQKSLSLSPGK | |
| 420 | GFTFSRVGVS | Affinity matured |
| | | variant hu1C7.v2 |
| | | CDR-H1_1-1 |
| 421 | GFKFSSVGVS | Affinity matured |
| | | variant hu1C7.v2 |
| | | CDR-H1_1-2 |
| 422 | GFKFSQVGVS | Affinity matured |
| | | variant hu1C7.v2 |
| | | CDR-H1_1-3 |
| 423 | GFKFSMVGVS | Affinity matured |
| | | variant hu1C7.v2 |
| | | CDR-H1_1-4 |
| 424 | GFKFSRYGVS | Affinity matured |
| | | variant hu1C7.v2 |
| | | CDR-H1_1-5 |
| 425 | GFKFSRVGMS | Affinity matured |
| | | variant hu1C7.v2 |
| | | CDR-H1_1-6 |
| 426 | GFTFSSVGTS | Affinity matured |
| | | variant hu1C7.v2 |
| | | CDR-H1_2-1 |
| 427 | GFTFSMVGTS | Affinity matured |
| | | variant hu1C7.v2 |
| | | CDR-H1_2-2 |
| 428 | GFTFSQVGTS | Affinity matured |
| | | variant hu1C7.v2 |
| | | CDR-H1_2-3 |
| 429 | GFTFSLVGTS | Affinity matured |
| | | variant hu1C7.v2 |
| | | CDR-H1_2-4 |
| 430 | GFTFSKVGTS | Affinity matured |
| | | variant hu1C7.v2 |
| | | CDR-H1_2-5 |
| 431 | GFTFSRYGTS | Affinity matured |
| | | variant hu1C7.v2 |
| | | CDR-H1_2-6 |
| 432 | GFTFSRVGMS | Affinity matured |
| | | variant hu1C7.v2 |
| | | CDR-H1_2-7 |
| 433 | GFTFSGPGMS | Affinity matured |
| | | variant hu1C7.v2 |
| | | CDR-H1_4-1 |
| 434 | GFQFSGPGMS | Affinity matured |
| | | variant hu1C7.v2 |
| | | CDR-H1_4-2 |
| 435 | GFMFSGPGMS | Affinity matured |
| | | variant hu1C7.v2 |
| | | CDR-H1_4-3 |
| 436 | GFRFSSPGMS | Affinity matured |
| | | variant hu1C7.v2 |
| | | CDR-H1_4-4 |
| 437 | GFRFSGYGMS | Affinity matured |
| | | variant hu1C7.v2 |
| | | CDR-H1_4-5 |
| 438 | SISGEGGSYIHYADSVK | Affinity matured |
| | | variant hu1C7.v2 |
| | | CDR-H2_1 |
| 439 | SISGTGGSYIHYADSVK | Affinity matured |
| | | variant hu1C7.v2 |
| | | CDR-H2_2 |
| 440 | SISGSGGSYIHYADSVK | Affinity matured |
| | | variant hu1C7.v2 |
| | | CDR-H2_3 |
| 441 | SISGDAGSYIHYADSVK | Affinity matured |
| | | variant hu1C7.v2 |
| | | CDR-H2_4 |
| 442 | SISGDGGSYIHYASSVK | Affinity matured |
| | | variant hu1C7.v2 |
| | | CDR-H2_5 |
| 443 | SISGDGGSYIHYADAVK | Affinity matured |
| | | variant hu1C7.v2 |
| | | CDR-H2_6 |
| 444 | KSSQSLLYSGNQKNYLT | Affinity matured |
| | | variant hu1C7.v2 |
| | | CDR-L1_4 |
| 445 | KSSQSLLSSGNQKNYLT | Affinity matured |
| | | variant hu1C7.v2 |
| | | CDR-L1_5 |
| 446 | KSSQSLLQSGNQKNYLT | Affinity matured |
| | | variant hu1C7.v2 |
| | | CDR-L1_6 |
| 447 | KSSQSLLNAGNQKNYLT | Affinity matured |
| | | variant hu1C7.v2 |
| | | CDR-L1_7 |
| 448 | KSSQSLVRSGTQKDYLV | Affinity matured |
| | | variant hu1C7.v2 |
| | | CDR-L1_3-1 |
| 449 | KSSQSLLRSGTQKDYLV | Affinity matured |
| | | variant hu1C7.v2 |
| | | CDR-L1_3-2 |
| 450 | KSSQSLHYSGTQKDYLV | Affinity matured |
| | | variant hu1C7.v2 |
| | | CDR-L1_3-3 |
| | | hu1C7.v2-1CDR-L1 |
| 451 | KSSQSLHNSGTQKDYLV | Affinity matured |
| | | variant hu1C7.v2 |
| | | CDR-L1_3-4 |
| 452 | KSSQSLHMSGTQKDYLV | Affinity matured |
| | | variant hu1C7.v2 |
| | | CDR-L1_3-5 |
| 453 | KSSQSLHQSGTQKDYLV | Affinity matured |
| | | variant hu1C7.v2 |
| | | CDR-L1_3-6 |
| 454 | KSSQSLHKSGTQKDYLV | Affinity matured |
| | | variant hu1C7.v2 |
| | | CDR-L1_3-7 |
| 455 | KSSQSLHLSGTQKDYLV | Affinity matured |
| | | variant hu1C7.v2 |
| | | CDR-L1_3-8 |
| 456 | KSSQSLHRSGNQKDYLV | Affinity matured |
| | | variant hu1C7.v2 |
| | | CDR-L1_3-9 |
| 457 | KSSQSLHRSGTQKNYLV | Affinity matured |
| | | variant hu1C7.v2 |
| | | CDR-L1_3-10 |
| 458 | KSSQSLHRSGTQKDYLA | Affinity matured |
| | | variant hu1C7.v2 |
| | | CDR-L1_3-11 |
| 459 | KSSQSLLYSGNQKDYLV | Affinity matured |
| | | variant hu1C7.v2 |
| | | CDR-L1_3-12 |
| | | hu1C7.v2-2 CDR-L1 |
| 460 | QQYYSYPLT | Affinity matured |
| | | variant hu1C7.v2 |
| | | CDR-L3_5 |
| 461 | QQYSSYPLT | Affinity matured |
| | | variant hu1C7.v2 |
| | | CDR-L3_6 |
| | | hu1C7.v2-1 CDR-L3 |
| | | hu1C7.v2-2 CDR-L3 |
| 462 | QQYNAYPLT | Affinity matured |
| | | variant hu1C7.v2 |
| | | CDR-L3_7 |
| 463 | DIVMTQSPDSLAVSLGERATINCKSSQSLHYSGTQKDYLVWYQQKPGQPP | hu1C7.v2-1 VL |
| | KLLIYWASTRESGVPDRFSGSGSGTDFTLTISSLQAEDVAVYYCQQYSSYP | 1C7_Lv8 |
| | LTFGQGTKVEIK | |
| 464 | DIVMTQSPDSLAVSLGERATINCKSSQSLLYSGNQKDYLVWYQQKPGQPP | hu1C7.v2-2 VL |
| | KLLIYWASTRESGVPDRFSGSGSGTDFTLTISSLQAEDVAVYYCQQYSSYP | |
| | LTFGQGTKVEIK | |
| 465 | GFX₁FSX₂X₃GX₄S, wherein X₁ is T, K, R, Q, or M; | hu1C7.v2-like CDR- |
| | X₂ is S, R, Q, M, L, K, G, or, S; X₃ is Y, V, or | H1 consensus_2 |
| | P; and X₄ is M, V, or T | |
| 466 | SISGX₁X₂GSYIHYAX₃X₄VK, wherein X₁ is D, E, T, or | hu1C7.v2-like CDR- |
| | S; X₂ is G or A; X₃ is D or S; and X₄ is S or A | H2 consensus_1 |
| 467 | KSSQSLX₁X₂X₃GX₄QKX₅YLX₆, wherein X₁ is L, H, or | hu1C7.v2-like CDR- |
| | V; X₂ is N, Y, S, Q, R, M, K, or L; X₃ is S or A; | L1 consensus_2 |
| | X₄ is T or N; X₅ is N or D; X₆ is T, V, or A | |
| 468 | QQYX₁X₂YPLT, wherein X₁ is N, Y, or S; | hu1C7.v2-like CDR- |
| | X₂ is S or A | L3 consensus_2 |
| 469 | APELLGGPSVFLFPPKPKDTLMISRTPEVTCVVVDVSHEDPEVKFNWYVD | Clone |
| | GVEVHNAKTKPREEQYNSTYRVVSVLTVLHQDWLNGKEYKCKVSNKAL | CH3C.35.20.1.1 |
| | PAPIEKTISKAKGQPREPQVYTLPPSRDELTKNQVSLTCLVKGFYPSDIAVE | |
| | WESFGTEWSSYKTTPPVLDSDGSFFLYSKLTVSKEEWQQGFVFSCSVMHE | |
| | ALHNHYTQKSLSLSPGK | |
| 470 | APELLGGPSVFLFPPKPKDTLMISRTPEVTCVVVDVSHEDPEVKFNWYVD | Clone |
| | GVEVHNAKTKPREEQYNSTYRVVSVLTVLHQDWLNGKEYKCKVSNKAL | CH3C.35.23.2.1 |
| | PAPIEKTISKAKGQPREPQVYTLPPSRDELTKNQVSLTCLVKGFYPSDIAVE | |
| | WESYGTEWANYKTTPPVLDSDGSFFLYSKLTVSKSEWQQGFVFSCSVMH | |
| | EALHNHYTQKSLSLSPGK | |
| 471 | APELLGGPSVFLFPPKPKDTLMISRTPEVTCVVVDVSHEDPEVKFNWYVD | Clone |
| | GVEVHNAKTKPREEQYNSTYRVVSVLTVLHQDWLNGKEYKCKVSNKAL | CH3C.35.23.1.1 |
| | PAPIEKTISKAKGQPREPQVYTLPPSRDELTKNQVSLTCLVKGFYPSDIAVE | |
| | WESFGTEWSNYKTTPPVLDSDGSFFLYSKLTVSKEEWQQGFVFSCSVMH | |
| | EALHNHYTQKSLSLSPGK | |
| 472 | APELLGGPSVFLFPPKPKDTLMISRTPEVTCVVVDVSHEDPEVKFNWYVD | Clone CH3C.35.S413 |
| | GVEVHNAKTKPREEQYNSTYRVVSVLTVLHQDWLNGKEYKCKVSNKAL | |
| | PAPIEKTISKAKGQPREPQVYTLPPSRDELTKNQVSLTCLVKGFYPSDIAVE | |
| | WESYGTEWSSYKTTPPVLDSDGSFFLYSKLTVSKSEWQQGFVFSCSVMHE | |
| | ALHNHYTQKSLSLSPGK | |
| 473 | APELLGGPSVFLFPPKPKDTLMISRTPEVTCVVVDVSHEDPEVKFNWYVD | Clone |
| | GVEVHNAKTKPREEQYNSTYRVVSVLTVLHQDWLNGKEYKCKVSNKAL | CH3C.35.23.3.1 |
| | PAPIEKTISKAKGQPREPQVYTLPPSRDELTKNQVSLTCLVKGFYPSDIAVE | |
| | WESYGTEWVNYKTTPPVLDSDGSFFLYSKLTVSKEEWQQGFVFSCSVMH | |
| | EALHNHYTQKSLSLSPGK | |
| 474 | APELLGGPSVFLFPPKPKDTLMISRTPEVTCVVVDVSHEDPEVKFNWYVD | Clone |
| | GVEVHNAKTKPREEQYNSTYRVVSVLTVLHQDWLNGKEYKCKVSNKAL | CH3C.35.N390.1 |
| | PAPIEKTISKAKGQPREPQVYTLPPSRDELTKNQVSLTCLVKGFYPSDIAVE | |
| | WESYGTEWSNYKTTPPVLDSDGSFFLYSKLTVSKSEWQQGFVFSCSVMH | |
| | EALHNHYTQKSLSLSPGK | |
| 475 | APELLGGPSVFLFPPKPKDTLMISRTPEVTCVVVDVSHEDPEVKFNWYVD | Clone |
| | GVEVHNAKTKPREEQYNSTYRVVSVLTVLHQDWLNGKEYKCKVSNKAL | CH3C.35.23.6.1 |
| | PAPIEKTISKAKGQPREPQVYTLPPSRDELTKNQVSLTCLVKGFYPSDIAVE | |
| | WESFGTEWVNYKTTPPVLDSDGSFFLYSKLTVSKEEWQQGFVFSCSVMH | |
| | EALHNHYTQKSLSLSPGK | |
| 476 | APEAAGGPSVFLFPPKPKDTLMISRTPEVTCVVVDVSHEDPEVKFNWYVD | Clone CH3C.35.21 |
| | GVEVHNAKTKPREEQYNSTYRVVSVLTVLHQDWLNGKEYKCKVSNKAL | with knob and |
| | GAPIEKTISKAKGQPREPQVYTLPPSRDELTKNQVSLWCLVKGFYPSDIAV | LALAPG mutations |
| | WWESYGTEWSSYKTTPPVLDSDGSFFLYSKLTVTKEEWQQGFVFSCSVM | |
| | HEALHNHYTQKSLSLSPGK | |
| 477 | APEAAGGPSVFLFPPKPKDTLYITREPEVTCVVVDVSHEDPEVKFNWYVD | Clone CH3C.35.21 |
| | GVEVHNAKTKPREEQYNSTYRVVSVLTVLHQDWLNGKEYKCKVSNKAL | with knob, LALAPG, |
| | GAPIEKTISKAKGQPREPQVYTLPPSRDELTKNQVSLWCLVKGFYPSDIAV | and YTE mutations |
| | WWESYGTEWSSYKTTPPVLDSDGSFFLYSKLTVTKEEWQQGFVFSCSVM | |
| | HEALHNHYTQKSLSLSPGK | |
| 478 | APEAAGGPSVFLFPPKPKDTLMISRTPEVTCVVVDVSHEDPEVKFNWYVD | Clone CH3C.35.21 |
| | GVEVHNAKTKPREEQYNSTYRVVSVLTVLHQDWLNGKEYKCKVSNKAL | with hole and |
| | GAPIEKTISKAKGQPREPQVYTLPPSRDELTKNQVSLSCAVKGFYPSDIAV | LALAPG mutations |
| | WWESYGTEWSSYKTTPPVLDSDGSFFLVSKLTVTKEEWQQGFVFSCSVM | |
| | HEALHNHYTQKSLSLSPGK | |
| 479 | APEAAGGPSVFLFPPKPKDTLYITREPEVTCVVVDVSHEDPEVKFNWYVD | Clone CH3C.35.21 |
| | GVEVHNAKTKPREEQYNSTYRVVSVLTVLHQDWLNGKEYKCKVSNKAL | with hole, LALAPG, |
| | GAPIEKTISKAKGQPREPQVYTLPPSRDELTKNQVSLSCAVKGFYPSDIAV | and YTE mutations |
| | WWESYGTEWSSYKTTPPVLDSDGSFFLVSKLTVTKEEWQQGFVFSCSVM | |
| | HEALHNHYTQKSLSLSPGK | |
| 480 | APELLGGPSVFLFPPKPKDTLMISRTPEVTCVVVDVSHEDPEVKFNWYVD | Clone |
| | GVEVHNAKTKPREEQYNSTYRVVSVLTVLHQDWLNGKEYKCKVSNKAL | CH3C.35.20.1.1 with |
| | PAPIEKTISKAKGQPREPQVYTLPPSRDELTKNQVSLWCLVKGFYPSDIAV | knob mutation |
| | EWESFGTEWSSYKTTPPVLDSDGSFFLYSKLTVSKEEWQQGFVFSCSVMH | |
| | EALHNHYTQKSLSLSPGK | |
| 481 | APEAAGGPSVFLFPPKPKDTLMISRTPEVTCVVVDVSHEDPEVKFNWYVD | Clone |
| | GVEVHNAKTKPREEQYNSTYRVVSVLTVLHQDWLNGKEYKCKVSNKAL | CH3C.35.20.1.1 with |
| | PAPIEKTISKAKGQPREPQVYTLPPSRDELTKNQVSLWCLVKGFYPSDIAV | knob and LALA |
| | EWESFGTEWSSYKTTPPVLDSDGSFFLYSKLTVSKEEWQQGFVFSCSVMH | mutations |
| | EALHNHYTQKSLSLSPGK | |
| 482 | APEAAGGPSVFLFPPKPKDTLMISRTPEVTCVVVDVSHEDPEVKFNWYVD | Clone |
| | GVEVHNAKTKPREEQYNSTYRVVSVLTVLHQDWLNGKEYKCKVSNKAL | CH3C.35.20.1.1 with |
| | GAPIEKTISKAKGQPREPQVYTLPPSRDELTKNQVSLWCLVKGFYPSDIAV | knob and LALAPG |
| | EWESFGTEWSSYKTTPPVLDSDGSFFLYSKLTVSKEEWQQGFVFSCSVMH | mutations |
| | EALHNHYTQKSLSLSPGK | |
| 483 | APELLGGPSVFLFPPKPKDTLYITREPEVTCVVVDVSHEDPEVKFNWYVD | Clone |
| | GVEVHNAKTKPREEQYNSTYRVVSVLTVLHQDWLNGKEYKCKVSNKAL | CH3C.35.20.1.1 with |
| | PAPIEKTISKAKGQPREPQVYTLPPSRDELTKNQVSLWCLVKGFYPSDIAV | knob and YTE |
| | EWESFGTEWSSYKTTPPVLDSDGSFFLYSKLTVSKEEWQQGFVFSCSVMH | mutations |
| | EALHNHYTQKSLSLSPGK | |
| 484 | APEAAGGPSVFLFPPKPKDTLYITREPEVTCVVVDVSHEDPEVKFNWYVD | Clone |
| | GVEVHNAKTKPREEQYNSTYRVVSVLTVLHQDWLNGKEYKCKVSNKAL | CH3C.35.20.1.1 with |
| | PAPIEKTISKAKGQPREPQVYTLPPSRDELTKNQVSLWCLVKGFYPSDIAV | knob LALA and |
| | EWESFGTEWSSYKTTPPVLDSDGSFFLYSKLTVSKEEWQQGFVFSCSVMH | YTE mutations |
| | EALHNHYTQKSLSLSPGK | |
| 485 | APEAAGGPSVFLFPPKPKDTLYITREPEVTCVVVDVSHEDPEVKFNWYVD | Clone |
| | GVEVHNAKTKPREEQYNSTYRVVSVLTVLHQDWLNGKEYKCKVSNKAL | CH3C.35.20.1.1 with |
| | GAPIEKTISKAKGQPREPQVYTLPPSRDELTKNQVSLWCLVKGFYPSDIAV | knob LALAPG and |
| | EWESFGTEWSSYKTTPPVLDSDGSFFLYSKLTVSKEEWQQGFVFSCSVMH | YTE mutations |
| | EALHNHYTQKSLSLSPGK | |
| 486 | APELLGGPSVFLFPPKPKDTLMISRTPEVTCVVVDVSHEDPEVKFNWYVD | Clone |
| | GVEVHNAKTKPREEQYNSTYRVVSVLTVLHQDWLNGKEYKCKVSNKAL | CH3C.35.20.1.1 with |
| | PAPIEKTISKAKGQPREPQVYTLPPSRDELTKNQVSLSCAVKGFYPSDIAVE | hole mutations |
| | WESFGTEWSSYKTTPPVLDSDGSFFLVSKLTVSKEEWQQGFVFSCSVMHE | |
| | ALHNHYTQKSLSLSPGK | |
| 487 | APEAAGGPSVFLFPPKPKDTLMISRTPEVTCVVVDVSHEDPEVKFNWYVD | Clone |
| | GVEVHNAKTKPREEQYNSTYRVVSVLTVLHQDWLNGKEYKCKVSNKAL | CH3C.35.20.1.1 with |
| | PAPIEKTISKAKGQPREPQVYTLPPSRDELTKNQVSLSCAVKGFYPSDIAVE | hole and LALA |
| | WESFGTEWSSYKTTPPVLDSDGSFFLVSKLTVSKEEWQQGFVFSCSVMHE | mutations |
| | ALHNHYTQKSLSLSPGK | |
| 488 | APEAAGGPSVFLFPPKPKDTLMISRTPEVTCVVVDVSHEDPEVKFNWYVD | Clone |
| | GVEVHNAKTKPREEQYNSTYRVVSVLTVLHQDWLNGKEYKCKVSNKAL | CH3C.35.20.1.1 with |
| | GAPIEKTISKAKGQPREPQVYTLPPSRDELTKNQVSLSCAVKGFYPSDIAV | hole and LALAPG |
| | EWESFGTEWSSYKTTPPVLDSDGSFFLVSKLTVSKEEWQQGFVFSCSVMH | mutations |
| | EALHNHYTQKSLSLSPGK | |
| 489 | APELLGGPSVFLFPPKPKDTLYITREPEVTCVVVDVSHEDPEVKFNWYVD | Clone |
| | GVEVHNAKTKPREEQYNSTYRVVSVLTVLHQDWLNGKEYKCKVSNKAL | CH3C.35.20.1.1 with |
| | PAPIEKTISKAKGQPREPQVYTLPPSRDELTKNQVSLSCAVKGFYPSDIAVE | hole and YTE |
| | WESFGTEWSSYKTTPPVLDSDGSFFLVSKLTVSKEEWQQGFVFSCSVMHE | mutations |
| | ALHNHYTQKSLSLSPGK | |
| 490 | APEAAGGPSVFLFPPKPKDTLYITREPEVTCVVVDVSHEDPEVKFNWYVD | Clone |
| | GVEVHNAKTKPREEQYNSTYRVVSVLTVLHQDWLNGKEYKCKVSNKAL | CH3C.35.20.1.1 with |
| | PAPIEKTISKAKGQPREPQVYTLPPSRDELTKNQVSLSCAVKGFYPSDIAVE | hole LALA and |
| | WESFGTEWSSYKTTPPVLDSDGSFFLVSKLTVSKEEWQQGFVFSCSVMHE | YTE mutations |
| | ALHNHYTQKSLSLSPGK | |
| 491 | APEAAGGPSVFLFPPKPKDTLYITREPEVTCVVVDVSHEDPEVKFNWYVD | Clone |
| | GVEVHNAKTKPREEQYNSTYRVVSVLTVLHQDWLNGKEYKCKVSNKAL | CH3C.35.20.1.1 with |
| | GAPIEKTISKAKGQPREPQVYTLPPSRDELTKNQVSLSCAVKGFYPSDIAV | hole LALAPG and |
| | EWESFGTEWSSYKTTPPVLDSDGSFFLVSKLTVSKEEWQQGFVFSCSVMH | YTE mutations |
| | EALHNHYTQKSLSLSPGK | |
| 492 | APELLGGPSVFLFPPKPKDTLMISRTPEVTCVVVDVSHEDPEVKFNWYVD | Clone |
| | GVEVHNAKTKPREEQYNSTYRVVSVLTVLHQDWLNGKEYKCKVSNKAL | CH3C.35.23.2.1 with |
| | PAPIEKTISKAKGQPREPQVYTLPPSRDELTKNQVSLWCLVKGFYPSDIAV | knob mutation |
| | EWESYGTEWANYKTTPPVLDSDGSFFLYSKLTVSKSEWQQGFVFSCSVM | |
| | HEALHNHYTQKSLSLSPGK | |
| 493 | APEAAGGPSVFLFPPKPKDTLMISRTPEVTCVVVDVSHEDPEVKFNWYVD | Clone |
| | GVEVHNAKTKPREEQYNSTYRVVSVLTVLHQDWLNGKEYKCKVSNKAL | CH3C.35.23.2.1 with |
| | PAPIEKTISKAKGQPREPQVYTLPPSRDELTKNQVSLWCLVKGFYPSDIAV | knob and LALA |
| | EWESYGTEWANYKTTPPVLDSDGSFFLYSKLTVSKSEWQQGFVFSCSVM | mutations |
| | HEALHNHYTQKSLSLSPGK | |
| 494 | APEAAGGPSVFLFPPKPKDTLMISRTPEVTCVVVDVSHEDPEVKFNWYVD | Clone |
| | GVEVHNAKTKPREEQYNSTYRVVSVLTVLHQDWLNGKEYKCKVSNKAL | CH3C.35.23.2.1 with |
| | GAPIEKTISKAKGQPREPQVYTLPPSRDELTKNQVSLWCLVKGFYPSDIAV | knob and LALAPG |
| | EWESYGTEWANYKTTPPVLDSDGSFFLYSKLTVSKSEWQQGFVFSCSVM | mutations |
| | HEALHNHYTQKSLSLSPGK | |
| 495 | APELLGGPSVFLFPPKPKDTLYITREPEVTCVVVDVSHEDPEVKFNWYVD | Clone |
| | GVEVHNAKTKPREEQYNSTYRVVSVLTVLHQDWLNGKEYKCKVSNKAL | CH3C.35.23.2.1 with |
| | PAPIEKTISKAKGQPREPQVYTLPPSRDELTKNQVSLWCLVKGFYPSDIAV | knob and YTE |
| | EWESYGTEWANYKTTPPVLDSDGSFFLYSKLTVSKSEWQQGFVFSCSVM | mutations |
| | HEALHNHYTQKSLSLSPGK | |
| 496 | APEAAGGPSVFLFPPKPKDTLYITREPEVTCVVVDVSHEDPEVKFNWYVD | Clone |
| | GVEVHNAKTKPREEQYNSTYRVVSVLTVLHQDWLNGKEYKCKVSNKAL | CH3C.35.23.2.1 with |
| | PAPIEKTISKAKGQPREPQVYTLPPSRDELTKNQVSLWCLVKGFYPSDIAV | knob, LALA, and |
| | EWESYGTEWANYKTTPPVLDSDGSFFLYSKLTVSKSEWQQGFVFSCSVM | YTE mutations |
| | HEALHNHYTQKSLSLSPGK | |
| 497 | APEAAGGPSVFLFPPKPKDTLYITREPEVTCVVVDVSHEDPEVKFNWYVD | Clone |
| | GVEVHNAKTKPREEQYNSTYRVVSVLTVLHQDWLNGKEYKCKVSNKAL | CH3C.35.23.2.1 with |
| | GAPIEKTISKAKGQPREPQVYTLPPSRDELTKNQVSLWCLVKGFYPSDIAV | knob, LALAPG, and |
| | EWESYGTEWANYKTTPPVLDSDGSFFLYSKLTVSKSEWQQGFVFSCSVM | YTE mutations |
| | HEALHNHYTQKSLSLSPGK | |
| 498 | APELLGGPSVFLFPPKPKDTLMISRTPEVTCVVVDVSHEDPEVKFNWYVD | Clone |
| | GVEVHNAKTKPREEQYNSTYRVVSVLTVLHQDWLNGKEYKCKVSNKAL | CH3C.35.23.2.1 with |
| | PAPIEKTISKAKGQPREPQVYTLPPSRDELTKNQVSLSCAVKGFYPSDIAVE | hole mutations |
| | WESYGTEWANYKTTPPVLDSDGSFFLVSKLTVSKSEWQQGFVFSCSVMH | |
| | EALHNHYTQKSLSLSPGK | |
| 499 | APEAAGGPSVFLFPPKPKDTLMISRTPEVTCVVVDVSHEDPEVKFNWYVD | Clone |
| | GVEVHNAKTKPREEQYNSTYRVVSVLTVLHQDWLNGKEYKCKVSNKAL | CH3C.35.23.2.1 with |
| | PAPIEKTISKAKGQPREPQVYTLPPSRDELTKNQVSLSCAVKGFYPSDIAVE | hole and LALA |
| | WESYGTEWANYKTTPPVLDSDGSFFLVSKLTVSKSEWQQGFVFSCSVMH | mutations |
| | EALHNHYTQKSLSLSPGK | |
| 500 | APEAAGGPSVFLFPPKPKDTLMISRTPEVTCVVVDVSHEDPEVKFNWYVD | Clone |
| | GVEVHNAKTKPREEQYNSTYRVVSVLTVLHQDWLNGKEYKCKVSNKAL | CH3C.35.23.2.1 with |
| | GAPIEKTISKAKGQPREPQVYTLPPSRDELTKNQVSLSCAVKGFYPSDIAV | hole and LALAPG |
| | EWESYGTEWANYKTTPPVLDSDGSFFLVSKLTVSKSEWQQGFVFSCSVM | mutations |
| | HEALHNHYTQKSLSLSPGK | |
| 501 | APELLGGPSVFLFPPKPKDTLYITREPEVTCVVVDVSHEDPEVKFNWYVD | Clone |
| | GVEVHNAKTKPREEQYNSTYRVVSVLTVLHQDWLNGKEYKCKVSNKAL | CH3C.35.23.2.1 with |
| | PAPIEKTISKAKGQPREPQVYTLPPSRDELTKNQVSLSCAVKGFYPSDIAVE | hole and YTE |
| | WESYGTEWANYKTTPPVLDSDGSFFLVSKLTVSKSEWQQGFVFSCSVMH | mutations |
| | EALHNHYTQKSLSLSPGK | |
| 502 | APEAAGGPSVFLFPPKPKDTLYITREPEVTCVVVDVSHEDPEVKFNWYVD | Clone |
| | GVEVHNAKTKPREEQYNSTYRVVSVLTVLHQDWLNGKEYKCKVSNKAL | CH3C.35.23.2.1 with |
| | PAPIEKTISKAKGQPREPQVYTLPPSRDELTKNQVSLSCAVKGFYPSDIAVE | hole, LALA, and |
| | WESYGTEWANYKTTPPVLDSDGSFFLVSKLTVSKSEWQQGFVFSCSVMH | YTE mutations |
| | EALHNHYTQKSLSLSPGK | |
| 503 | APEAAGGPSVFLFPPKPKDTLYITREPEVTCVVVDVSHEDPEVKFNWYVD | Clone |
| | GVEVHNAKTKPREEQYNSTYRVVSVLTVLHQDWLNGKEYKCKVSNKAL | CH3C.35.23.2.1 with |
| | GAPIEKTISKAKGQPREPQVYTLPPSRDELTKNQVSLSCAVKGFYPSDIAV | hole, LALAPG, and |
| | EWESYGTEWANYKTTPPVLDSDGSFFLVSKLTVSKSEWQQGFVFSCSVM | YTE mutations |
| | HEALHNHYTQKSLSLSPGK | |
| 504 | APELLGGPSVFLFPPKPKDTLMISRTPEVTCVVVDVSHEDPEVKFNWYVD | Clone |
| | GVEVHNAKTKPREEQYNSTYRVVSVLTVLHQDWLNGKEYKCKVSNKAL | CH3C.35.23.1.1 with |
| | PAPIEKTISKAKGQPREPQVYTLPPSRDELTKNQVSLWCLVKGFYPSDIAV | knob mutation |
| | EWESFGTEWSNYKTTPPVLDSDGSFFLYSKLTVSKEEWQQGFVFSCSVM | |
| | HEALHNHYTQKSLSLSPGK | |
| 505 | APEAAGGPSVFLFPPKPKDTLMISRTPEVTCVVVDVSHEDPEVKFNWYVD | Clone |
| | GVEVHNAKTKPREEQYNSTYRVVSVLTVLHQDWLNGKEYKCKVSNKAL | CH3C.35.23.1.1 with |
| | PAPIEKTISKAKGQPREPQVYTLPPSRDELTKNQVSLWCLVKGFYPSDIAV | knob and LALA |
| | EWESFGTEWSNYKTTPPVLDSDGSFFLYSKLTVSKEEWQQGFVFSCSVM | mutations |
| | HEALHNHYTQKSLSLSPGK | |
| 506 | APEAAGGPSVFLFPPKPKDTLMISRTPEVTCVVVDVSHEDPEVKFNWYVD | Clone |
| | GVEVHNAKTKPREEQYNSTYRVVSVLTVLHQDWLNGKEYKCKVSNKAL | CH3C.35.23.1.1 with |
| | GAPIEKTISKAKGQPREPQVYTLPPSRDELTKNQVSLWCLVKGFYPSDIAV | knob and LALAPG |
| | EWESFGTEWSNYKTTPPVLDSDGSFFLYSKLTVSKEEWQQGFVFSCSVM | mutations |
| | HEALHNHYTQKSLSLSPGK | |
| 507 | APELLGGPSVFLFPPKPKDTLYITREPEVTCVVVDVSHEDPEVKFNWYVD | Clone |
| | GVEVHNAKTKPREEQYNSTYRVVSVLTVLHQDWLNGKEYKCKVSNKAL | CH3C.35.23.1.1 with |
| | PAPIEKTISKAKGQPREPQVYTLPPSRDELTKNQVSLWCLVKGFYPSDIAV | knob and YTE |
| | EWESFGTEWSNYKTTPPVLDSDGSFFLYSKLTVSKEEWQQGFVFSCSVM | mutations |
| | HEALHNHYTQKSLSLSPGK | |
| 508 | APEAAGGPSVFLFPPKPKDTLYITREPEVTCVVVDVSHEDPEVKFNWYVD | Clone |
| | GVEVHNAKTKPREEQYNSTYRVVSVLTVLHQDWLNGKEYKCKVSNKAL | CH3C.35.23.1.1 with |
| | PAPIEKTISKAKGQPREPQVYTLPPSRDELTKNQVSLWCLVKGFYPSDIAV | knob, LALA, and |
| | EWESFGTEWSNYKTTPPVLDSDGSFFLYSKLTVSKEEWQQGFVFSCSVM | YTE mutations |
| | HEALHNHYTQKSLSLSPGK | |
| 509 | APEAAGGPSVFLFPPKPKDTLYITREPEVTCVVVDVSHEDPEVKFNWYVD | Clone |
| | GVEVHNAKTKPREEQYNSTYRVVSVLTVLHQDWLNGKEYKCKVSNKAL | CH3C.35.23.1.1 with |
| | GAPIEKTISKAKGQPREPQVYTLPPSRDELTKNQVSLWCLVKGFYPSDIAV | knob, LALAPG, and |
| | EWESFGTEWSNYKTTPPVLDSDGSFFLYSKLTVSKEEWQQGFVFSCSVM | YTE mutations |
| | HEALHNHYTQKSLSLSPGK | |
| 510 | APELLGGPSVFLFPPKPKDTLMISRTPEVTCVVVDVSHEDPEVKFNWYVD | Clone |
| | GVEVHNAKTKPREEQYNSTYRVVSVLTVLHQDWLNGKEYKCKVSNKAL | CH3C.35.23.1.1 with |
| | PAPIEKTISKAKGQPREPQVYTLPPSRDELTKNQVSLSCAVKGFYPSDIAVE | hole mutations |
| | WESFGTEWSNYKTTPPVLDSDGSFFLVSKLTVSKEEWQQGFVFSCSVMH | |
| | EALHNHYTQKSLSLSPGK | |
| 511 | APEAAGGPSVFLFPPKPKDTLMISRTPEVTCVVVDVSHEDPEVKFNWYVD | Clone |
| | GVEVHNAKTKPREEQYNSTYRVVSVLTVLHQDWLNGKEYKCKVSNKAL | CH3C.35.23.1.1 with |
| | PAPIEKTISKAKGQPREPQVYTLPPSRDELTKNQVSLSCAVKGFYPSDIAVE | hole and LALA |
| | WESFGTEWSNYKTTPPVLDSDGSFFLVSKLTVSKEEWQQGFVFSCSVMH | mutations |
| | EALHNHYTQKSLSLSPGK | |
| 512 | APEAAGGPSVFLFPPKPKDTLMISRTPEVTCVVVDVSHEDPEVKFNWYVD | Clone |
| | GVEVHNAKTKPREEQYNSTYRVVSVLTVLHQDWLNGKEYKCKVSNKAL | CH3C.35.23.1.1 with |
| | GAPIEKTISKAKGQPREPQVYTLPPSRDELTKNQVSLSCAVKGFYPSDIAV | hole and LALAPG |
| | EWESFGTEWSNYKTTPPVLDSDGSFFLVSKLTVSKEEWQQGFVFSCSVM | mutations |
| | HEALHNHYTQKSLSLSPGK | |
| 513 | APELLGGPSVFLFPPKPKDTLYITREPEVTCVVVDVSHEDPEVKFNWYVD | Clone |
| | GVEVHNAKTKPREEQYNSTYRVVSVLTVLHQDWLNGKEYKCKVSNKAL | CH3C.35.23.1.1 with |
| | PAPIEKTISKAKGQPREPQVYTLPPSRDELTKNQVSLSCAVKGFYPSDIAVE | hole and YTE |
| | WESFGTEWSNYKTTPPVLDSDGSFFLVSKLTVSKEEWQQGFVFSCSVMH | mutations |
| | EALHNHYTQKSLSLSPGK | |
| 514 | APEAAGGPSVFLFPPKPKDTLYITREPEVTCVVVDVSHEDPEVKFNWYVD | Clone |
| | GVEVHNAKTKPREEQYNSTYRVVSVLTVLHQDWLNGKEYKCKVSNKAL | CH3C.35.23.1.1 with |
| | PAPIEKTISKAKGQPREPQVYTLPPSRDELTKNQVSLSCAVKGFYPSDIAVE | hole, LALA, and |
| | WESFGTEWSNYKTTPPVLDSDGSFFLVSKLTVSKEEWQQGFVFSCSVMH | YTE mutations |
| | EALHNHYTQKSLSLSPGK | |
| 515 | APEAAGGPSVFLFPPKPKDTLYITREPEVTCVVVDVSHEDPEVKFNWYVD | Clone |
| | GVEVHNAKTKPREEQYNSTYRVVSVLTVLHQDWLNGKEYKCKVSNKAL | CH3C.35.23.1.1 with |
| | GAPIEKTISKAKGQPREPQVYTLPPSRDELTKNQVSLSCAVKGFYPSDIAV | hole, LALAPG, and |
| | EWESFGTEWSNYKTTPPVLDSDGSFFLVSKLTVSKEEWQQGFVFSCSVM | YTE mutations |
| | HEALHNHYTQKSLSLSPGK | |
| 516 | APELLGGPSVFLFPPKPKDTLMISRTPEVTCVVVDVSHEDPEVKFNWYVD | Clone CH3C.35.20.1 |
| | GVEVHNAKTKPREEQYNSTYRVVSVLTVLHQDWLNGKEYKCKVSNKAL | M198L and N204S |
| | PAPIEKTISKAKGQPREPQVYTLPPSRDELTKNQVSLTCLVKGFYPSDIAVE | mutations |
| | WESFGTEWSSYKTTPPVLDSDGSFFLYSKLTVTKEEWQQGFVFSCSVLHE | |
| | ALHSHYTQKSLSLSPGK | |
| 517 | APELLGGPSVFLFPPKPKDTLMISRTPEVTCVVVDVSHEDPEVKFNWYVD | Clone CH3C.35.20.1 |
| | GVEVHNAKTKPREEQYNSTYRVVSVLTVLHQDWLNGKEYKCKVSNKAL | with knob and M198L |
| | PAPIEKTISKAKGQPREPQVYTLPPSRDELTKNQVSLWCLVKGFYPSDIAV | and N204S mutations |
| | EWESFGTEWSSYKTTPPVLDSDGSFFLYSKLTVTKEEWQQGFVFSCSVLH | |
| | EALHSHYTQKSLSLSPGK | |
| 518 | APEAAGGPSVFLFPPKPKDTLMISRTPEVTCVVVDVSHEDPEVKFNWYVD | Clone CH3C.35.20.1 |
| | GVEVHNAKTKPREEQYNSTYRVVSVLTVLHQDWLNGKEYKCKVSNKAL | with knob, LALA, |
| | PAPIEKTISKAKGQPREPQVYTLPPSRDELTKNQVSLWCLVKGFYPSDIAV | and M198L and |
| | EWESFGTEWSSYKTTPPVLDSDGSFFLYSKLTVTKEEWQQGFVFSCSVLH | N204S mutations |
| | EALHSHYTQKSLSLSPGK | |
| 519 | APEAAGGPSVFLFPPKPKDTLMISRTPEVTCVVVDVSHEDPEVKFNWYVD | Clone CH3C.35.20.1 |
| | GVEVHNAKTKPREEQYNSTYRVVSVLTVLHQDWLNGKEYKCKVSNKAL | with knob, LALAPG, |
| | GAPIEKTISKAKGQPREPQVYTLPPSRDELTKNQVSLWCLVKGFYPSDIAV | and M198L and |
| | EWESFGTEWSSYKTTPPVLDSDGSFFLYSKLTVTKEEWQQGFVFSCSVLH | N204S mutations |
| | EALHSHYTQKSLSLSPGK | |
| 520 | APELLGGPSVFLFPPKPKDTLMISRTPEVTCVVVDVSHEDPEVKFNWYVD | Clone CH3C.35.20.1 |
| | GVEVHNAKTKPREEQYNSTYRVVSVLTVLHQDWLNGKEYKCKVSNKAL | with hole and M198L |
| | PAPIEKTISKAKGQPREPQVYTLPPSRDELTKNQVSLSCAVKGFYPSDIAVE | and N204S mutations |
| | WESFGTEWSSYKTTPPVLDSDGSFFLVSKLTVTKEEWQQGFVFSCSVLHE | |
| | ALHSHYTQKSLSLSPGK | |
| 521 | APEAAGGPSVFLFPPKPKDTLMISRTPEVTCVVVDVSHEDPEVKFNWYVD | Clone CH3C.35.20.1 |
| | GVEVHNAKTKPREEQYNSTYRVVSVLTVLHQDWLNGKEYKCKVSNKAL | with hole, LALA, and |
| | PAPIEKTISKAKGQPREPQVYTLPPSRDELTKNQVSLSCAVKGFYPSDIAVE | M198L and N204S |
| | WESFGTEWSSYKTTPPVLDSDGSFFLVSKLTVTKEEWQQGFVFSCSVLHE | mutations |
| | ALHSHYTQKSLSLSPGK | |
| 522 | APEAAGGPSVFLFPPKPKDTLMISRTPEVTCVVVDVSHEDPEVKFNWYVD | Clone CH3C.35.20.1 |
| | GVEVHNAKTKPREEQYNSTYRVVSVLTVLHQDWLNGKEYKCKVSNKAL | with hole, LALAPG, |
| | GAPIEKTISKAKGQPREPQVYTLPPSRDELTKNQVSLSCAVKGFYPSDIAV | and M198L and |
| | EWESFGTEWSSYKTTPPVLDSDGSFFLVSKLTVTKEEWQQGFVFSCSVLH | N204S mutations |
| | EALHSHYTQKSLSLSPGK | |
| 523 | APELLGGPSVFLFPPKPKDTLMISRTPEVTCVVVDVSHEDPEVKFNWYVD | Clone CH3C.35.23.2 |
| | GVEVHNAKTKPREEQYNSTYRVVSVLTVLHQDWLNGKEYKCKVSNKAL | with M198L and |
| | PAPIEKTISKAKGQPREPQVYTLPPSRDELTKNQVSLTCLVKGFYPSDIAVE | N204S mutations |
| | WESYGTEWANYKTTPPVLDSDGSFFLYSKLTVTKEEWQQGFVFSCSVLH | |
| | EALHSHYTQKSLSLSPGK | |
| 524 | APELLGGPSVFLFPPKPKDTLMISRTPEVTCVVVDVSHEDPEVKFNWYVD | Clone CH3C.35.23.2 |
| | GVEVHNAKTKPREEQYNSTYRVVSVLTVLHQDWLNGKEYKCKVSNKAL | with knob and M198L |
| | PAPIEKTISKAKGQPREPQVYTLPPSRDELTKNQVSLWCLVKGFYPSDIAV | and N204S mutations |
| | EWESYGTEWANYKTTPPVLDSDGSFFLYSKLTVTKEEWQQGFVFSCSVL | |
| | HEALHSHYTQKSLSLSPGK | |
| 525 | APEAAGGPSVFLFPPKPKDTLMISRTPEVTCVVVDVSHEDPEVKFNWYVD | Clone CH3C.35.23.2 |
| | GVEVHNAKTKPREEQYNSTYRVVSVLTVLHQDWLNGKEYKCKVSNKAL | with knob, LALA, |
| | PAPIEKTISKAKGQPREPQVYTLPPSRDELTKNQVSLWCLVKGFYPSDIAV | and M198L and |
| | EWESYGTEWANYKTTPPVLDSDGSFFLYSKLTVTKEEWQQGFVFSCSVL | N204S mutations |
| | HEALHSHYTQKSLSLSPGK | |
| 526 | APEAAGGPSVFLFPPKPKDTLMISRTPEVTCVVVDVSHEDPEVKFNWYVD | Clone CH3C.35.23.2 |
| | GVEVHNAKTKPREEQYNSTYRVVSVLTVLHQDWLNGKEYKCKVSNKAL | with knob, LALAPG, |
| | GAPIEKTISKAKGQPREPQVYTLPPSRDELTKNQVSLWCLVKGFYPSDIAV | and M198L and |
| | EWESYGTEWANYKTTPPVLDSDGSFFLYSKLTVTKEEWQQGFVFSCSVL | N204S mutations |
| | HEALHSHYTQKSLSLSPGK | |
| 527 | APELLGGPSVFLFPPKPKDTLMISRTPEVTCVVVDVSHEDPEVKFNWYVD | Clone CH3C.35.23.2 |
| | GVEVHNAKTKPREEQYNSTYRVVSVLTVLHQDWLNGKEYKCKVSNKAL | with hole and M198L |
| | PAPIEKTISKAKGQPREPQVYTLPPSRDELTKNQVSLSCAVKGFYPSDIAVE | and N204S mutations |
| | WESYGTEWANYKTTPPVLDSDGSFFLVSKLTVTKEEWQQGFVFSCSVLH | |
| | EALHSHYTQKSLSLSPGK | |
| 528 | APEAAGGPSVFLFPPKPKDTLMISRTPEVTCVVVDVSHEDPEVKFNWYVD | Clone CH3C.35.23.2 |
| | GVEVHNAKTKPREEQYNSTYRVVSVLTVLHQDWLNGKEYKCKVSNKAL | with hole, LALA, and |
| | PAPIEKTISKAKGQPREPQVYTLPPSRDELTKNQVSLSCAVKGFYPSDIAVE | M198L and N204S |
| | WESYGTEWANYKTTPPVLDSDGSFFLVSKLTVTKEEWQQGFVFSCSVLH | mutations |
| | EALHSHYTQKSLSLSPGK | |
| 529 | APEAAGGPSVFLFPPKPKDTLMISRTPEVTCVVVDVSHEDPEVKFNWYVD | Clone CH3C.35.23.2 |
| | GVEVHNAKTKPREEQYNSTYRVVSVLTVLHQDWLNGKEYKCKVSNKAL | with hole, LALAPG, |
| | GAPIEKTISKAKGQPREPQVYTLPPSRDELTKNQVSLSCAVKGFYPSDIAV | and M198L and |
| | EWESYGTEWANYKTTPPVLDSDGSFFLVSKLTVTKEEWQQGFVFSCSVL | N204S mutations |
| | HEALHSHYTQKSLSLSPGK | |
| 530 | APELLGGPSVFLFPPKPKDTLMISRTPEVTCVVVDVSHEDPEVKFNWYVD | Clone CH3C.35.23.3 |
| | GVEVHNAKTKPREEQYNSTYRVVSVLTVLHQDWLNGKEYKCKVSNKAL | with M198L and |
| | PAPIEKTISKAKGQPREPQVYTLPPSRDELTKNQVSLTCLVKGFYPSDIAVE | |
| | WESYGTEWVNYKTTPPVLDSDGSFFLYSKLTVTKEEWQQGFVFSCSVLH | N204S mutations |
| | EALHSHYTQKSLSLSPGK | |
| 531 | APELLGGPSVFLFPPKPKDTLMISRTPEVTCVVVDVSHEDPEVKFNWYVD | Clone CH3C.35.23.3 |
| | GVEVHNAKTKPREEQYNSTYRVVSVLTVLHQDWLNGKEYKCKVSNKAL | with knob and M198L |
| | PAPIEKTISKAKGQPREPQVYTLPPSRDELTKNQVSLWCLVKGFYPSDIAV | and N204S mutations |
| | EWESYGTEWVNYKTTPPVLDSDGSFFLYSKLTVTKEEWQQGFVFSCSVL | |
| | HEALHSHYTQKSLSLSPGK | |
| 532 | APEAAGGPSVFLFPPKPKDTLMISRTPEVTCVVVDVSHEDPEVKFNWYVD | Clone CH3C.35.23.3 |
| | GVEVHNAKTKPREEQYNSTYRVVSVLTVLHQDWLNGKEYKCKVSNKAL | with knob, LALA, |
| | PAPIEKTISKAKGQPREPQVYTLPPSRDELTKNQVSLWCLVKGFYPSDIAV | and M198L and |
| | EWESYGTEWVNYKTTPPVLDSDGSFFLYSKLTVTKEEWQQGFVFSCSVL | N204S mutations |
| | HEALHSHYTQKSLSLSPGK | |
| 533 | APEAAGGPSVFLFPPKPKDTLMISRTPEVTCVVVDVSHEDPEVKFNWYVD | Clone CH3C.35.23.3 |
| | GVEVHNAKTKPREEQYNSTYRVVSVLTVLHQDWLNGKEYKCKVSNKAL | with knob, LALAPG, |
| | GAPIEKTISKAKGQPREPQVYTLPPSRDELTKNQVSLWCLVKGFYPSDIAV | and M198L and |
| | EWESYGTEWVNYKTTPPVLDSDGSFFLYSKLTVTKEEWQQGFVFSCSVL | N204S mutations |
| | HEALHSHYTQKSLSLSPGK | |
| 534 | APELLGGPSVFLFPPKPKDTLMISRTPEVTCVVVDVSHEDPEVKFNWYVD | Clone CH3C.35.23.3 |
| | GVEVHNAKTKPREEQYNSTYRVVSVLTVLHQDWLNGKEYKCKVSNKAL | with hole and M198L |
| | PAPIEKTISKAKGQPREPQVYTLPPSRDELTKNQVSLSCAVKGFYPSDIAVE | and N204S mutations |
| | WESYGTEWVNYKTTPPVLDSDGSFFLVSKLTVTKEEWQQGFVFSCSVLH | |
| | EALHSHYTQKSLSLSPGK | |
| 535 | APEAAGGPSVFLFPPKPKDTLMISRTPEVTCVVVDVSHEDPEVKFNWYVD | Clone CH3C.35.23.3 |
| | GVEVHNAKTKPREEQYNSTYRVVSVLTVLHQDWLNGKEYKCKVSNKAL | with hole, LALA, and |
| | PAPIEKTISKAKGQPREPQVYTLPPSRDELTKNQVSLSCAVKGFYPSDIAVE | M198L and N204S |
| | WESYGTEWVNYKTTPPVLDSDGSFFLVSKLTVTKEEWQQGFVFSCSVLH | mutations |
| | EALHSHYTQKSLSLSPGK | |
| 536 | APEAAGGPSVFLFPPKPKDTLMISRTPEVTCVVVDVSHEDPEVKFNWYVD | Clone CH3C.35.23.3 |
| | GVEVHNAKTKPREEQYNSTYRVVSVLTVLHQDWLNGKEYKCKVSNKAL | with hole, LALAPG, |
| | GAPIEKTISKAKGQPREPQVYTLPPSRDELTKNQVSLSCAVKGFYPSDIAV | and M198L and |
| | EWESYGTEWVNYKTTPPVLDSDGSFFLVSKLTVTKEEWQQGFVFSCSVL | N204S mutations |
| | HEALHSHYTQKSLSLSPGK | |
| 537 | APELLGGPSVFLFPPKPKDTLMISRTPEVTCVVVDVSHEDPEVKFNWYVD | Clone CH3C.35.23.4 |
| | GVEVHNAKTKPREEQYNSTYRVVSVLTVLHQDWLNGKEYKCKVSNKAL | with M198L and |
| | PAPIEKTISKAKGQPREPQVYTLPPSRDELTKNQVSLTCLVKGFYPSDIAVE | N204S mutations |
| | WESYGTEWSNYKTTPPVLDSDGSFFLYSKLTVSKEEWQQGFVFSCSVLHE | |
| | ALHSHYTQKSLSLSPGK | |
| 538 | APELLGGPSVFLFPPKPKDTLMISRTPEVTCVVVDVSHEDPEVKFNWYVD | Clone CH3C.35.23.4 |
| | GVEVHNAKTKPREEQYNSTYRVVSVLTVLHQDWLNGKEYKCKVSNKAL | with knob and M198L |
| | PAPIEKTISKAKGQPREPQVYTLPPSRDELTKNQVSLWCLVKGFYPSDIAV | and N204S mutations |
| | EWESYGTEWSNYKTTPPVLDSDGSFFLYSKLTVSKEEWQQGFVFSCSVLH | |
| | EALHSHYTQKSLSLSPGK | |
| 539 | APEAAGGPSVFLFPPKPKDTLMISRTPEVTCVVVDVSHEDPEVKFNWYVD | Clone CH3C.35.23.4 |
| | GVEVHNAKTKPREEQYNSTYRVVSVLTVLHQDWLNGKEYKCKVSNKAL | with knob, LALA, |
| | PAPIEKTISKAKGQPREPQVYTLPPSRDELTKNQVSLWCLVKGFYPSDIAV | and M198L and |
| | EWESYGTEWSNYKTTPPVLDSDGSFFLYSKLTVSKEEWQQGFVFSCSVLH | N204S mutations |
| | EALHSHYTQKSLSLSPGK | |
| 540 | APEAAGGPSVFLFPPKPKDTLMISRTPEVTCVVVDVSHEDPEVKFNWYVD | Clone CH3C.35.23.4 |
| | GVEVHNAKTKPREEQYNSTYRVVSVLTVLHQDWLNGKEYKCKVSNKAL | with knob, LALAPG, |
| | GAPIEKTISKAKGQPREPQVYTLPPSRDELTKNQVSLWCLVKGFYPSDIAV | and M198L and |
| | EWESYGTEWSNYKTTPPVLDSDGSFFLYSKLTVSKEEWQQGFVFSCSVLH | N204S mutations |
| | EALHSHYTQKSLSLSPGK | |
| 541 | APELLGGPSVFLFPPKPKDTLMISRTPEVTCVVVDVSHEDPEVKFNWYVD | Clone CH3C.35.23.4 |
| | GVEVHNAKTKPREEQYNSTYRVVSVLTVLHQDWLNGKEYKCKVSNKAL | with hole and M198L |
| | PAPIEKTISKAKGQPREPQVYTLPPSRDELTKNQVSLSCAVKGFYPSDIAVE | and N204S mutations |
| | WESYGTEWSNYKTTPPVLDSDGSFFLVSKLTVSKEEWQQGFVFSCSVLHE | |
| | ALHSHYTQKSLSLSPGK | |
| 542 | APEAAGGPSVFLFPPKPKDTLMISRTPEVTCVVVDVSHEDPEVKFNWYVD | Clone CH3C.35.23.4 |
| | GVEVHNAKTKPREEQYNSTYRVVSVLTVLHQDWLNGKEYKCKVSNKAL | with hole, LALA, and |
| | PAPIEKTISKAKGQPREPQVYTLPPSRDELTKNQVSLSCAVKGFYPSDIAVE | M198L and N204S |
| | WESYGTEWSNYKTTPPVLDSDGSFFLVSKLTVSKEEWQQGFVFSCSVLHE | mutations |
| | ALHSHYTQKSLSLSPGK | |
| 543 | APEAAGGPSVFLFPPKPKDTLMISRTPEVTCVVVDVSHEDPEVKFNWYVD | Clone CH3C.35.23.4 |
| | GVEVHNAKTKPREEQYNSTYRVVSVLTVLHQDWLNGKEYKCKVSNKAL | with hole, LALAPG, |
| | GAPIEKTISKAKGQPREPQVYTLPPSRDELTKNQVSLSCAVKGFYPSDIAV | and M198L and |
| | EWESYGTEWSNYKTTPPVLDSDGSFFLVSKLTVSKEEWQQGFVFSCSVLH | N204S mutations |
| | EALHSHYTQKSLSLSPGK | |
| 544 | APELLGGPSVFLFPPKPKDTLMISRTPEVTCVVVDVSHEDPEVKFNWYVD | Clone |
| | GVEVHNAKTKPREEQYNSTYRVVSVLTVLHQDWLNGKEYKCKVSNKAL | CH3C.35.21.17.2 |
| | PAPIEKTISKAKGQPREPQVYTLPPSRDELTKNQVSLTCLVKGFYPSDIAVL | with M198L and |
| | WESYGTEWASYKTTPPVLDSDGSFFLYSKLTVTKEEWQQGFVFSCSVLHE | N204S mutations |
| | ALHSHYTQKSLSLSPGK | |
| 545 | APELLGGPSVFLFPPKPKDTLMISRTPEVTCVVVDVSHEDPEVKFNWYVD | Clone |
| | GVEVHNAKTKPREEQYNSTYRVVSVLTVLHQDWLNGKEYKCKVSNKAL | CH3C.35.21.17.2 |
| | PAPIEKTISKAKGQPREPQVYTLPPSRDELTKNQVSLWCLVKGFYPSDIAV | with knob and M198L |
| | LWESYGTEWASYKTTPPVLDSDGSFFLYSKLTVTKEEWQQGFVFSCSVLH | and N204S mutations |
| | EALHSHYTQKSLSLSPGK | |
| 546 | APEAAGGPSVFLFPPKPKDTLMISRTPEVTCVVVDVSHEDPEVKFNWYVD | Clone |
| | GVEVHNAKTKPREEQYNSTYRVVSVLTVLHQDWLNGKEYKCKVSNKAL | CH3C.35.21.17.2 |
| | PAPIEKTISKAKGQPREPQVYTLPPSRDELTKNQVSLWCLVKGFYPSDIAV | with knob, LALA, |
| | LWESYGTEWASYKTTPPVLDSDGSFFLYSKLTVTKEEWQQGFVFSCSVLH | and M198L and |
| | EALHSHYTQKSLSLSPGK | N204S mutations |
| 547 | APEAAGGPSVFLFPPKPKDTLMISRTPEVTCVVVDVSHEDPEVKFNWYVD | Clone |
| | GVEVHNAKTKPREEQYNSTYRVVSVLTVLHQDWLNGKEYKCKVSNKAL | CH3C.35.21.17.2 |
| | GAPIEKTISKAKGQPREPQVYTLPPSRDELTKNQVSLWCLVKGFYPSDIAV | with knob, LALAPG, |
| | LWESYGTEWASYKTTPPVLDSDGSFFLYSKLTVTKEEWQQGFVFSCSVLH | and M198L and |
| | EALHSHYTQKSLSLSPGK | N204S mutations |
| 548 | APELLGGPSVFLFPPKPKDTLMISRTPEVTCVVVDVSHEDPEVKFNWYVD | Clone |
| | GVEVHNAKTKPREEQYNSTYRVVSVLTVLHQDWLNGKEYKCKVSNKAL | CH3C.35.21.17.2 |
| | PAPIEKTISKAKGQPREPQVYTLPPSRDELTKNQVSLSCAVKGFYPSDIAVL | with hole and M198L |
| | WESYGTEWASYKTTPPVLDSDGSFFLVSKLTVTKEEWQQGFVFSCSVLHE | and N204S mutations |
| | ALHSHYTQKSLSLSPGK | |
| 549 | APEAAGGPSVFLFPPKPKDTLMISRTPEVTCVVVDVSHEDPEVKFNWYVD | Clone |
| | GVEVHNAKTKPREEQYNSTYRVVSVLTVLHQDWLNGKEYKCKVSNKAL | CH3C.35.21.17.2 |
| | PAPIEKTISKAKGQPREPQVYTLPPSRDELTKNQVSLSCAVKGFYPSDIAVL | with hole, LALA, and |
| | WESYGTEWASYKTTPPVLDSDGSFFLVSKLTVTKEEWQQGFVFSCSVLHE | M198L and N204S |
| | ALHSHYTQKSLSLSPGK | mutations |
| 550 | APEAAGGPSVFLFPPKPKDTLMISRTPEVTCVVVDVSHEDPEVKFNWYVD | Clone |
| | GVEVHNAKTKPREEQYNSTYRVVSVLTVLHQDWLNGKEYKCKVSNKAL | CH3C.35.21.17.2 |
| | GAPIEKTISKAKGQPREPQVYTLPPSRDELTKNQVSLSCAVKGFYPSDIAV | with hole, LALAPG, |
| | LWESYGTEWASYKTTPPVLDSDGSFFLVSKLTVTKEEWQQGFVFSCSVLH | and M198L and |
| | EALHSHYTQKSLSLSPGK | N204S mutations |
| 551 | APELLGGPSVFLFPPKPKDTLMISRTPEVTCVVVDVSHEDPEVKFNWYVD | Clone CH3C.35.23 |
| | GVEVHNAKTKPREEQYNSTYRVVSVLTVLHQDWLNGKEYKCKVSNKAL | with M198L and |
| | PAPIEKTISKAKGQPREPQVYTLPPSRDELTKNQVSLTCLVKGFYPSDIAVE | N204S mutations |
| | WESYGTEWSNYKTTPPVLDSDGSFFLYSKLTVTKEEWQQGFVFSCSVLHE | |
| | ALHSHYTQKSLSLSPGK | |
| 552 | APELLGGPSVFLFPPKPKDTLMISRTPEVTCVVVDVSHEDPEVKFNWYVD | Clone CH3C.35.23 |
| | GVEVHNAKTKPREEQYNSTYRVVSVLTVLHQDWLNGKEYKCKVSNKAL | with knob and M198L |
| | PAPIEKTISKAKGQPREPQVYTLPPSRDELTKNQVSLWCLVKGFYPSDIAV | and N204S mutations |
| | EWESYGTEWSNYKTTPPVLDSDGSFFLYSKLTVTKEEWQQGFVFSCSVLH | |
| | EALHSHYTQKSLSLSPGK | |
| 553 | APEAAGGPSVFLFPPKPKDTLMISRTPEVTCVVVDVSHEDPEVKFNWYVD | Clone CH3C.35.23 |
| | GVEVHNAKTKPREEQYNSTYRVVSVLTVLHQDWLNGKEYKCKVSNKAL | with knob, LALA, |
| | PAPIEKTISKAKGQPREPQVYTLPPSRDELTKNQVSLWCLVKGFYPSDIAV | and M198L and |
| | EWESYGTEWSNYKTTPPVLDSDGSFFLYSKLTVTKEEWQQGFVFSCSVLH | N204S mutations |
| | EALHSHYTQKSLSLSPGK | |
| 554 | APEAAGGPSVFLFPPKPKDTLMISRTPEVTCVVVDVSHEDPEVKFNWYVD | Clone CH3C.35.23 |
| | GVEVHNAKTKPREEQYNSTYRVVSVLTVLHQDWLNGKEYKCKVSNKAL | with knob, LALAPG, |
| | GAPIEKTISKAKGQPREPQVYTLPPSRDELTKNQVSLWCLVKGFYPSDIAV | and M198L and |
| | EWESYGTEWSNYKTTPPVLDSDGSFFLYSKLTVTKEEWQQGFVFSCSVLH | N204S mutations |
| | EALHSHYTQKSLSLSPGK | |
| 555 | APELLGGPSVFLFPPKPKDTLMISRTPEVTCVVVDVSHEDPEVKFNWYVD | Clone CH3C.35.23 |
| | GVEVHNAKTKPREEQYNSTYRVVSVLTVLHQDWLNGKEYKCKVSNKAL | with hole and M198L |
| | PAPIEKTISKAKGQPREPQVYTLPPSRDELTKNQVSLSCAVKGFYPSDIAVE | and N204S mutations |
| | WESYGTEWSNYKTTPPVLDSDGSFFLVSKLTVTKEEWQQGFVFSCSVLHE | |
| | ALHSHYTQKSLSLSPGK | |
| 556 | APEAAGGPSVFLFPPKPKDTLMISRTPEVTCVVVDVSHEDPEVKFNWYVD | Clone CH3C.35.23 |
| | GVEVHNAKTKPREEQYNSTYRVVSVLTVLHQDWLNGKEYKCKVSNKAL | with hole, LALA, and |
| | PAPIEKTISKAKGQPREPQVYTLPPSRDELTKNQVSLSCAVKGFYPSDIAVE | M198L and N204S |
| | WESYGTEWSNYKTTPPVLDSDGSFFLVSKLTVTKEEWQQGFVFSCSVLHE | mutations |
| | ALHSHYTQKSLSLSPGK | |
| 557 | APEAAGGPSVFLFPPKPKDTLMISRTPEVTCVVVDVSHEDPEVKFNWYVD | Clone CH3C.35.23 |
| | GVEVHNAKTKPREEQYNSTYRVVSVLTVLHQDWLNGKEYKCKVSNKAL | with hole, LALAPG, |
| | GAPIEKTISKAKGQPREPQVYTLPPSRDELTKNQVSLSCAVKGFYPSDIAV | and M198L and |
| | EWESYGTEWSNYKTTPPVLDSDGSFFLVSKLTVTKEEWQQGFVFSCSVLH | N204S mutations |
| | EALHSHYTQKSLSLSPGK | |
| 558 | APELLGGPSVFLFPPKPKDTLMISRTPEVTCVVVDVSHEDPEVKFNWYVD | Clone CH3C.35.21 |
| | GVEVHNAKTKPREEQYNSTYRVVSVLTVLHQDWLNGKEYKCKVSNKAL | with M198L and |
| | PAPIEKTISKAKGQPREPQVYTLPPSRDELTKNQVSLTCLVKGFYPSDIAV | N204S mutations |
| | WWESYGTEWSSYKTTPPVLDSDGSFFLYSKLTVTKEEWQQGFVFSCSVL | |
| | HEALHSHYTQKSLSLSPGK | |
| 559 | APELLGGPSVFLFPPKPKDTLMISRTPEVTCVVVDVSHEDPEVKFNWYVD | Clone CH3C.35.21 |
| | GVEVHNAKTKPREEQYNSTYRVVSVLTVLHQDWLNGKEYKCKVSNKAL | with knob and M198L |
| | PAPIEKTISKAKGQPREPQVYTLPPSRDELTKNQVSLWCLVKGFYPSDIAV | and N204S mutations |
| | WWESYGTEWSSYKTTPPVLDSDGSFFLYSKLTVTKEEWQQGFVFSCSVL | |
| | HEALHSHYTQKSLSLSPGK | |
| 560 | APEAAGGPSVFLFPPKPKDTLMISRTPEVTCVVVDVSHEDPEVKFNWYVD | Clone CH3C.35.21 |
| | GVEVHNAKTKPREEQYNSTYRVVSVLTVLHQDWLNGKEYKCKVSNKAL | with knob, LALA, |
| | PAPIEKTISKAKGQPREPQVYTLPPSRDELTKNQVSLWCLVKGFYPSDIAV | and M198L and |
| | WWESYGTEWSSYKTTPPVLDSDGSFFLYSKLTVTKEEWQQGFVFSCSVL | N204S mutations |
| | HEALHSHYTQKSLSLSPGK | |
| 561 | APEAAGGPSVFLFPPKPKDTLMISRTPEVTCVVVDVSHEDPEVKFNWYVD | Clone CH3C.35.21 |
| | GVEVHNAKTKPREEQYNSTYRVVSVLTVLHQDWLNGKEYKCKVSNKAL | with knob, LALAPG, |
| | GAPIEKTISKAKGQPREPQVYTLPPSRDELTKNQVSLWCLVKGFYPSDIAV | and M198L and |
| | WWESYGTEWSSYKTTPPVLDSDGSFFLYSKLTVTKEEWQQGFVFSCSVL | N204S mutations |
| | HEALHSHYTQKSLSLSPGK | |
| 562 | APELLGGPSVFLFPPKPKDTLMISRTPEVTCVVVDVSHEDPEVKFNWYVD | Clone CH3C.35.21 |
| | GVEVHNAKTKPREEQYNSTYRVVSVLTVLHQDWLNGKEYKCKVSNKAL | with hole and M198L |
| | PAPIEKTISKAKGQPREPQVYTLPPSRDELTKNQVSLSCAVKGFYPSDIAV | and N204S mutations |
| | WWESYGTEWSSYKTTPPVLDSDGSFFLVSKLTVTKEEWQQGFVFSCSVL | |
| | HEALHSHYTQKSLSLSPGK | |
| 563 | APEAAGGPSVFLFPPKPKDTLMISRTPEVTCVVVDVSHEDPEVKFNWYVD | Clone CH3C.35.21 |
| | GVEVHNAKTKPREEQYNSTYRVVSVLTVLHQDWLNGKEYKCKVSNKAL | with hole, LALA, and |
| | PAPIEKTISKAKGQPREPQVYTLPPSRDELTKNQVSLSCAVKGFYPSDIAV | M198L and N204S |
| | WWESYGTEWSSYKTTPPVLDSDGSFFLVSKLTVTKEEWQQGFVFSCSVL | mutations |
| | HEALHSHYTQKSLSLSPGK | |
| 564 | APEAAGGPSVFLFPPKPKDTLMISRTPEVTCVVVDVSHEDPEVKFNWYVD | Clone CH3C.35.21 |
| | GVEVHNAKTKPREEQYNSTYRVVSVLTVLHQDWLNGKEYKCKVSNKAL | with hole, LALAPG, |
| | GAPIEKTISKAKGQPREPQVYTLPPSRDELTKNQVSLSCAVKGFYPSDIAV | and M198L and |
| | WWESYGTEWSSYKTTPPVLDSDGSFFLVSKLTVTKEEWQQGFVFSCSVL | N204S mutations |
| | HEALHSHYTQKSLSLSPGK | |
| 565 | APELLGGPSVFLFPPKPKDTLMISRTPEVTCVVVDVSHEDPEVKFNWYVD | Clone |
| | GVEVHNAKTKPREEQYNSTYRVVSVLTVLHQDWLNGKEYKCKVSNKAL | CH3C.35.20.1.1 with |
| | PAPIEKTISKAKGQPREPQVYTLPPSRDELTKNQVSLTCLVKGFYPSDIAVE | M198L and N204S |
| | WESFGTEWSSYKTTPPVLDSDGSFFLYSKLTVSKEEWQQGFVFSCSVLHE | mutations |
| | ALHSHYTQKSLSLSPGK | |
| 566 | APELLGGPSVFLFPPKPKDTLMISRTPEVTCVVVDVSHEDPEVKFNWYVD | Clone |
| | GVEVHNAKTKPREEQYNSTYRVVSVLTVLHQDWLNGKEYKCKVSNKAL | CH3C.35.20.1.1 with |
| | PAPIEKTISKAKGQPREPQVYTLPPSRDELTKNQVSLWCLVKGFYPSDIAV | knob and M198L and |
| | EWESFGTEWSSYKTTPPVLDSDGSFFLYSKLTVSKEEWQQGFVFSCSVLH | N204S mutations |
| | EALHSHYTQKSLSLSPGK | |
| 567 | APEAAGGPSVFLFPPKPKDTLMISRTPEVTCVVVDVSHEDPEVKFNWYVD | Clone |
| | GVEVHNAKTKPREEQYNSTYRVVSVLTVLHQDWLNGKEYKCKVSNKAL | CH3C.35.20.1.1 with |
| | PAPIEKTISKAKGQPREPQVYTLPPSRDELTKNQVSLWCLVKGFYPSDIAV | knob, LALA, and |
| | EWESFGTEWSSYKTTPPVLDSDGSFFLYSKLTVSKEEWQQGFVFSCSVLH | M198L and N204S |
| | EALHSHYTQKSLSLSPGK | mutations |
| 568 | APEAAGGPSVFLFPPKPKDTLMISRTPEVTCVVVDVSHEDPEVKFNWYVD | Clone |
| | GVEVHNAKTKPREEQYNSTYRVVSVLTVLHQDWLNGKEYKCKVSNKAL | CH3C.35.20.1.1 with |
| | GAPIEKTISKAKGQPREPQVYTLPPSRDELTKNQVSLWCLVKGFYPSDIAV | knob, LALAPG, and |
| | EWESFGTEWSSYKTTPPVLDSDGSFFLYSKLTVSKEEWQQGFVFSCSVLH | M198L and N204S |
| | EALHSHYTQKSLSLSPGK | mutations |
| 569 | APELLGGPSVFLFPPKPKDTLMISRTPEVTCVVVDVSHEDPEVKFNWYVD | Clone |
| | GVEVHNAKTKPREEQYNSTYRVVSVLTVLHQDWLNGKEYKCKVSNKAL | CH3C.35.20.1.1 with |
| | PAPIEKTISKAKGQPREPQVYTLPPSRDELTKNQVSLSCAVKGFYPSDIAVE | hole and M198L and |
| | WESFGTEWSSYKTTPPVLDSDGSFFLVSKLTVSKEEWQQGFVFSCSVLHE | N204S mutations |
| | ALHSHYTQKSLSLSPGK | |
| 570 | APEAAGGPSVFLFPPKPKDTLMISRTPEVTCVVVDVSHEDPEVKFNWYVD | Clone |
| | GVEVHNAKTKPREEQYNSTYRVVSVLTVLHQDWLNGKEYKCKVSNKAL | CH3C.35.20.1.1 with |
| | PAPIEKTISKAKGQPREPQVYTLPPSRDELTKNQVSLSCAVKGFYPSDIAVE | hole, LALA, and |
| | WESFGTEWSSYKTTPPVLDSDGSFFLVSKLTVSKEEWQQGFVFSCSVLHE | M198L and N204S |
| | ALHSHYTQKSLSLSPGK | mutations |
| 571 | APEAAGGPSVFLFPPKPKDTLMISRTPEVTCVVVDVSHEDPEVKFNWYVD | Clone |
| | GVEVHNAKTKPREEQYNSTYRVVSVLTVLHQDWLNGKEYKCKVSNKAL | CH3C.35.20.1.1 with |
| | GAPIEKTISKAKGQPREPQVYTLPPSRDELTKNQVSLSCAVKGFYPSDIAV | hole, LALAPG, and |
| | EWESFGTEWSSYKTTPPVLDSDGSFFLVSKLTVSKEEWQQGFVFSCSVLH | M198L and N204S |
| | EALHSHYTQKSLSLSPGK | mutations |
| 572 | APELLGGPSVFLFPPKPKDTLMISRTPEVTCVVVDVSHEDPEVKFNWYVD | Clone |
| | GVEVHNAKTKPREEQYNSTYRVVSVLTVLHQDWLNGKEYKCKVSNKAL | CH3C.35.23.2.1 with |
| | PAPIEKTISKAKGQPREPQVYTLPPSRDELTKNQVSLTCLVKGFYPSDIAVE | M198L and N204S |
| | WESYGTEWANYKTTPPVLDSDGSFFLYSKLTVSKSEWQQGFVFSCSVLH | mutations |
| | EALHSHYTQKSLSLSPGK | |
| 573 | APELLGGPSVFLFPPKPKDTLMISRTPEVTCVVVDVSHEDPEVKFNWYVD | Clone |
| | GVEVHNAKTKPREEQYNSTYRVVSVLTVLHQDWLNGKEYKCKVSNKAL | CH3C.35.23.2.1 with |
| | PAPIEKTISKAKGQPREPQVYTLPPSRDELTKNQVSLWCLVKGFYPSDIAV | knob and M198L and |
| | EWESYGTEWANYKTTPPVLDSDGSFFLYSKLTVSKSEWQQGFVFSCSVL | N204S mutations |
| | HEALHSHYTQKSLSLSPGK | |
| 574 | APEAAGGPSVFLFPPKPKDTLMISRTPEVTCVVVDVSHEDPEVKFNWYVD | Clone |
| | GVEVHNAKTKPREEQYNSTYRVVSVLTVLHQDWLNGKEYKCKVSNKAL | CH3C.35.23.2.1 with |
| | PAPIEKTISKAKGQPREPQVYTLPPSRDELTKNQVSLWCLVKGFYPSDIAV | knob, LALA, and |
| | EWESYGTEWANYKTTPPVLDSDGSFFLYSKLTVSKSEWQQGFVFSCSVL | M198L and N204S |
| | HEALHSHYTQKSLSLSPGK | mutations |
| 575 | APEAAGGPSVFLFPPKPKDTLMISRTPEVTCVVVDVSHEDPEVKFNWYVD | Clone |
| | GVEVHNAKTKPREEQYNSTYRVVSVLTVLHQDWLNGKEYKCKVSNKAL | CH3C.35.23.2.1 with |
| | GAPIEKTISKAKGQPREPQVYTLPPSRDELTKNQVSLWCLVKGFYPSDIAV | knob, LALAPG, and |
| | EWESYGTEWANYKTTPPVLDSDGSFFLYSKLTVSKSEWQQGFVFSCSVL | M198L and N204S |
| | HEALHSHYTQKSLSLSPGK | mutations |
| 576 | APELLGGPSVFLFPPKPKDTLMISRTPEVTCVVVDVSHEDPEVKFNWYVD | Clone |
| | GVEVHNAKTKPREEQYNSTYRVVSVLTVLHQDWLNGKEYKCKVSNKAL | CH3C.35.23.2.1 with |
| | PAPIEKTISKAKGQPREPQVYTLPPSRDELTKNQVSLSCAVKGFYPSDIAVE | hole and M198L and |
| | WESYGTEWANYKTTPPVLDSDGSFFLVSKLTVSKSEWQQGFVFSCSVLH | N204S mutations |
| | EALHSHYTQKSLSLSPGK | |
| 577 | APEAAGGPSVFLFPPKPKDTLMISRTPEVTCVVVDVSHEDPEVKFNWYVD | Clone |
| | GVEVHNAKTKPREEQYNSTYRVVSVLTVLHQDWLNGKEYKCKVSNKAL | CH3C.35.23.2.1 with |
| | PAPIEKTISKAKGQPREPQVYTLPPSRDELTKNQVSLSCAVKGFYPSDIAVE | hole, LALA, and |
| | WESYGTEWANYKTTPPVLDSDGSFFLVSKLTVSKSEWQQGFVFSCSVLH | M198L and N204S |
| | EALHSHYTQKSLSLSPGK | mutations |
| 578 | APEAAGGPSVFLFPPKPKDTLMISRTPEVTCVVVDVSHEDPEVKFNWYVD | Clone |
| | GVEVHNAKTKPREEQYNSTYRVVSVLTVLHQDWLNGKEYKCKVSNKAL | CH3C.35.23.2.1 with |
| | GAPIEKTISKAKGQPREPQVYTLPPSRDELTKNQVSLSCAVKGFYPSDIAV | hole, LALAPG, and |
| | EWESYGTEWANYKTTPPVLDSDGSFFLVSKLTVSKSEWQQGFVFSCSVL | M198L and N204S |
| | HEALHSHYTQKSLSLSPGK | mutations |
| 579 | APELLGGPSVFLFPPKPKDTLMISRTPEVTCVVVDVSHEDPEVKFNWYVD | Clone |
| | GVEVHNAKTKPREEQYNSTYRVVSVLTVLHQDWLNGKEYKCKVSNKAL | CH3C.35.23.1.1 with |
| | PAPIEKTISKAKGQPREPQVYTLPPSRDELTKNQVSLTCLVKGFYPSDIAVE | M198L and N204S |
| | WESFGTEWSNYKTTPPVLDSDGSFFLYSKLTVSKEEWQQGFVFSCSVLHE | mutations |
| | ALHSHYTQKSLSLSPGK | |
| 580 | APELLGGPSVFLFPPKPKDTLMISRTPEVTCVVVDVSHEDPEVKFNWYVD | Clone |
| | GVEVHNAKTKPREEQYNSTYRVVSVLTVLHQDWLNGKEYKCKVSNKAL | CH3C.35.23.1.1 with |
| | PAPIEKTISKAKGQPREPQVYTLPPSRDELTKNQVSLWCLVKGFYPSDIAV | knob and M198L an d |
| | EWESFGTEWSNYKTTPPVLDSDGSFFLYSKLTVSKEEWQQGFVFSCSVLH | N204S mutations |
| | EALHSHYTQKSLSLSPGK | |
| 581 | APEAAGGPSVFLFPPKPKDTLMISRTPEVTCVVVDVSHEDPEVKFNWYVD | Clone |
| | GVEVHNAKTKPREEQYNSTYRVVSVLTVLHQDWLNGKEYKCKVSNKAL | CH3C.35.23.1.1 with |
| | PAPIEKTISKAKGQPREPQVYTLPPSRDELTKNQVSLWCLVKGFYPSDIAV | knob, LALA, and |
| | EWESFGTEWSNYKTTPPVLDSDGSFFLYSKLTVSKEEWQQGFVFSCSVLH | M198L and N204S |
| | EALHSHYTQKSLSLSPGK | mutations |
| 582 | APEAAGGPSVFLFPPKPKDTLMISRTPEVTCVVVDVSHEDPEVKFNWYVD | Clone |
| | GVEVHNAKTKPREEQYNSTYRVVSVLTVLHQDWLNGKEYKCKVSNKAL | CH3C.35.23.1.1 with |
| | GAPIEKTISKAKGQPREPQVYTLPPSRDELTKNQVSLWCLVKGFYPSDIAV | knob, LALAPG, and |
| | EWESFGTEWSNYKTTPPVLDSDGSFFLYSKLTVSKEEWQQGFVFSCSVLH | M198L and N204S |
| | EALHSHYTQKSLSLSPGK | mutations |
| 583 | APELLGGPSVFLFPPKPKDTLMISRTPEVTCVVVDVSHEDPEVKFNWYVD | Clone |
| | GVEVHNAKTKPREEQYNSTYRVVSVLTVLHQDWLNGKEYKCKVSNKAL | CH3C.35.23.1.1 with |
| | PAPIEKTISKAKGQPREPQVYTLPPSRDELTKNQVSLSCAVKGFYPSDIAVE | hole and M198L and |
| | WESFGTEWSNYKTTPPVLDSDGSFFLVSKLTVSKEEWQQGFVFSCSVLHE | N204S mutations |
| | ALHSHYTQKSLSLSPGK | |
| 584 | APEAAGGPSVFLFPPKPKDTLMISRTPEVTCVVVDVSHEDPEVKFNWYVD | Clone |
| | GVEVHNAKTKPREEQYNSTYRVVSVLTVLHQDWLNGKEYKCKVSNKAL | CH3C.35.23.1.1 with |
| | PAPIEKTISKAKGQPREPQVYTLPPSRDELTKNQVSLSCAVKGFYPSDIAVE | hole, LALA, and |
| | WESFGTEWSNYKTTPPVLDSDGSFFLVSKLTVSKEEWQQGFVFSCSVLHE | M198L and N204S |
| | ALHSHYTQKSLSLSPGK | mutations |
| 585 | APEAAGGPSVFLFPPKPKDTLMISRTPEVTCVVVDVSHEDPEVKFNWYVD | Clone |
| | GVEVHNAKTKPREEQYNSTYRVVSVLTVLHQDWLNGKEYKCKVSNKAL | CH3C.35.23.1.1 with |
| | GAPIEKTISKAKGQPREPQVYTLPPSRDELTKNQVSLSCAVKGFYPSDIAV | hole, LALAPG, and |
| | EWESFGTEWSNYKTTPPVLDSDGSFFLVSKLTVSKEEWQQGFVFSCSVLH | M198L and N204S |
| | EALHSHYTQKSLSLSPGK | mutations |
| 586 | GFTFSQVGMS | Affinity matured |
| | | variant hu1 C7 |
| | | CDR-Hl_HCv2 |
| 587 | GFKFSGPGMS | Affinity matured |
| | | variant hu1 C7 |
| | | CDR-H1_HCv5 |
| 588 | SISGDGGSYIHYADSVKG | 1C7 CDR-H2 |
| 589 | EVQLLESGGGLVQPGGSLRLSCAASGFTFSRVGTSWVRQAPGKGLEWVA | hu1C7_VH_1 |
| | SISGDGGSYIHYADSVKGRFTISRDNSKNTLYLQMNSLRAEDTAVYYCAR | |
| | LPYWGQGTLVTVSS | |
| 590 | EVQLLESGGGLVQPGGSLRLSCAASGFTFSSVGTSWVRQAPGKGLEWVA | hu1C7_VH_2 |
| | SISGDGGSYIHYADSVKGRFTISRDNSKNTLYLQMNSLRAEDTAVYYCAR | |
| | LPYWGQGTLVTVSS | |
| 591 | EVQLLESGGGLVQPGGSLRLSCAASGFTFSMVGTSWVRQAPGKGLEWVA | hu1C7_VH_3 |
| | SISGDGGSYIHYADSVKGRFTISRDNSKNTLYLQMNSLRAEDTAVYYCAR | |
| | LPYWGQGTLVTVSS | |
| 592 | EVQLLESGGGLVQPGGSLRLSCAASGFTFSQVGTSWVRQAPGKGLEWVA | hu1C7_VH_4 |
| | SISGDGGSYIHYADSVKGRFTISRDNSKNTLYLQMNSLRAEDTAVYYCAR | |
| | LPYWGQGTLVTVSS | |
| 593 | EVQLLESGGGLVQPGGSLRLSCAASGFTFSLVGTSWVRQAPGKGLEWVA | hu1C7_VH_5 |
| | SISGDGGSYIHYADSVKGRFTISRDNSKNTLYLQMNSLRAEDTAVYYCAR | |
| | LPYWGQGTLVTVSS | |
| 594 | EVQLLESGGGLVQPGGSLRLSCAASGFTFSKVGTSWVRQAPGKGLEWVA | hu1C7_VH_6 |
| | SISGDGGSYIHYADSVKGRFTISRDNSKNTLYLQMNSLRAEDTAVYYCAR | |
| | LPYWGQGTLVTVSS | |
| 595 | EVQLLESGGGLVQPGGSLRLSCAASGFTFSRVGMSWVRQAPGKGLEWVA | hu1C7_VH_7 |
| | SISGDGGSYIHYADSVKGRFTISRDNSKNTLYLQMNSLRAEDTAVYYCAR | |
| | LPYWGQGTLVTVSS | |
| 596 | EVQLLESGGGLVQPGGSLRLSCAASGFRFSGPGMSWVRQAPGKGLEWVA | hu1C7_VH_8 |
| | SISGDGGSYIHYADSVKGRFTISRDNSKNTLYLQMNSLRAEDTAVYYCAR | |
| | LPYWGQGTLVTVSS | |
| 597 | EVQLLESGGGLVQPGGSLRLSCAASGFTFSGPGMSWVRQAPGKGLEWVA | hu1C7_VH_9 |
| | SISGDGGSYIHYADSVKGRFTISRDNSKNTLYLQMNSLRAEDTAVYYCAR | |
| | LPYWGQGTLVTVSS | |
| 598 | EVQLLESGGGLVQPGGSLRLSCAASGFQFSGPGMSWVRQAPGKGLEWVA | hu1C7_VH_10 |
| | SISGDGGSYIHYADSVKGRFTISRDNSKNTLYLQMNSLRAEDTAVYYCAR | |
| | LPYWGQGTLVTVSS | |
| 599 | EVQLLESGGGLVQPGGSLRLSCAASGFMFSGPGMSWVRQAPGKGLEWV | hu1C7_VH_11 |
| | ASISGDGGSYIHYADSVKGRFTISRDNSKNTLYLQMNSLRAEDTAVYYCA | |
| | RLPYWGQGTLVTVSS | |
| 600 | EVQLLESGGGLVQPGGSLRLSCAASGFRFSSPGMSWVRQAPGKGLEWVA | hu1C7_VH_12 |
| | SISGDGGSYIHYADSVKGRFTISRDNSKNTLYLQMNSLRAEDTAVYYCAR | |
| | LPYWGQGTLVTVSS | |
| 601 | EVQLLESGGGLVQPGGSLRLSCAASGFRFSGYGMSWVRQAPGKGLEWV | hu1C7_VH_13 |
| | ASISGDGGSYIHYADSVKGRFTISRDNSKNTLYLQMNSLRAEDTAVYYCA | |
| | RLPYWGQGTLVTVSS | |
| 602 | EVQLLESGGGLVQPGGSLRLSCAASGFTFSQVGMSWVRQAPGKGLEWV | hu1C7_VH_14 |
| | ASISGDGGSYIHYADSVKGRFTISRDNSKNTLYLQMNSLRAEDTAVYYCA | |
| | RLPYWGQGTLVTVSS | |
| 603 | EVQLLESGGGLVQPGGSLRLSCAASGFKFSGPGMSWVRQAPGKGLEWVA | hu1C7_VH_15 |
| | SISGDGGSYIHYADSVKGRFTISRDNSKNTLYLQMNSLRAEDTAVYYCAR | |
| | LPYWGQGTLVTVSS | |
| 604 | DIVMTQSPDSLAVSLGERATINCKSSQSLHRSGTQKDYLVWYQQKPGQPP | hu1C7_VL_1 |
| | KLLIYWASTRESGVPDRFSGSGSGTDFTLTISSLQAEDVAVYYCQQYNSYP | |
| | LTFGQGTKVEIK | |
| 605 | DIVMTQSPDSLAVSLGERATINCKSSQSLVRSGTQKDYLVWYQQKPGQPP | hu1C7_VL_2 |
| | KLLIYWASTRESGVPDRFSGSGSGTDFTLTISSLQAEDVAVYYCQQYNSYP | |
| | LTFGQGTKVEIK | |
| 606 | DIVMTQSPDSLAVSLGERATINCKSSQSLLRSGTQKDYLVWYQQKPGQPP | hu1C7_VL_3 |
| | KLLIYWASTRESGVPDRFSGSGSGTDFTLTISSLQAEDVAVYYCQQYNSYP | |
| | LTFGQGTKVEIK | |
| 607 | DIVMTQSPDSLAVSLGERATINCKSSQSLHYSGTQKDYLVWYQQKPGQPP | hu1C7_VL_4 |
| | KLLIYWASTRESGVPDRFSGSGSGTDFTLTISSLQAEDVAVYYCQQYNSYP | |
| | LTFGQGTKVEIK | |
| 608 | DIVMTQSPDSLAVSLGERATINCKSSQSLHNSGTQKDYLVWYQQKPGQPP | hu1C7_VL_5 |
| | KLLIYWASTRESGVPDRFSGSGSGTDFTLTISSLQAEDVAVYYCQQYNSYP | |
| | LTFGQGTKVEIK | |
| 609 | DIVMTQSPDSLAVSLGERATINCKSSQSLHMSGTQKDYLVWYQQKPGQP | hu1C7_VL_6 |
| | PKLLIYWASTRESGVPDRFSGSGSGTDFTLTISSLQAEDVAVYYCQQYNSY | |
| | PLTFGQGTKVEIK | |
| 610 | DIVMTQSPDSLAVSLGERATINCKSSQSLHQSGTQKDYLVWYQQKPGQPP | hu1C7_VL_7 |
| | KLLIYWASTRESGVPDRFSGSGSGTDFTLTISSLQAEDVAVYYCQQYNSYP | |
| | LTFGQGTKVEIK | |
| 611 | DIVMTQSPDSLAVSLGERATINCKSSQSLHKSGTQKDYLVWYQQKPGQPP | hu1C7_VL_8 |
| | KLLIYWASTRESGVPDRFSGSGSGTDFTLTISSLQAEDVAVYYCQQYNSYP | |
| | LTFGQGTKVEIK | |
| 612 | DIVMTQSPDSLAVSLGERATINCKSSQSLHLSGTQKDYLVWYQQKPGQPP | hu1C7_VL_9 |
| | KLLIYWASTRESGVPDRFSGSGSGTDFTLTISSLQAEDVAVYYCQQYNSYP | |
| | LTFGQGTKVEIK | |
| 613 | DIVMTQSPDSLAVSLGERATINCKSSQSLHRSGNQKDYLVWYQQKPGQPP | hu1C7_VL_10 |
| | KLLIYWASTRESGVPDRFSGSGSGTDFTLTISSLQAEDVAVYYCQQYNSYP | |
| | LTFGQGTKVEIK | |
| 614 | DIVMTQSPDSLAVSLGERATINCKSSQSLHRSGTQKNYLVWYQQKPGQPP | hu1C7_VL_11 |
| | KLLIYWASTRESGVPDRFSGSGSGTDFTLTISSLQAEDVAVYYCQQYNSYP | |
| | LTFGQGTKVEIK | |
| 615 | DIVMTQSPDSLAVSLGERATINCKSSQSLHRSGTQKDYLAWYQQKPGQPP | hu1C7_VL_12 |
| | KLLIYWASTRESGVPDRFSGSGSGTDFTLTISSLQAEDVAVYYCQQYNSYP | |
| | LTFGQGTKVEIK | |
| 616 | DIVMTQSPDSLAVSLGERATINCKSSQSLHRSGTQKDYLVWYQQKPGQPP | hu1C7_VL_13 |
| | KLLIYWASTRESGVPDRFSGSGSGTDFTLTISSLQAEDVAVYYCQQYSSYP | |
| | LTFGQGTKVEIK | |
| 617 | X₁X₂X₃X₄X₅X₆X₇GX₈S, wherein X₁ is G or V; X₂ is F | hu1C7.v2-like CDR- |
| | or I; X₃ is T, K, R, Q, or M; X₄ is F or W; X₅ is | H1 consensus_3 |
| | S or R; X₆ is S, R, G, I, Q, M, L, or K; X₇ is Y, | |
| | V, or P; and X₈ iS M, V, or T | |
| 618 | KSSX₁SLX₂X₃X₄X₅X₆X₇X₈X₉YLX₁₀, wherein X₁ is Q or | hu1C7.v2-like CDR- |
| | H; X₂ is L, Y, H, or V; X₃ is N, S, R, Y, Q, M, | L1 consensus_3 |
| | K, or L; X₄ is S or A; X₅ is G or R; X₆ is N, R, | |
| | K, or T; X₇ is Q, H, or R; X₈ is K or Q; X₉ is N, | |
| | H, or D; and X₁₀ is T, A, or V | |
| 619 | QX₁YX₂X₃YPX₄T, wherein X₁ is Q, K, or H; X₂ is N, | hu1C7.v2-like CDR- |
| | D, R, Y, or S; X₃ is S, T, or A; and X₄ is L or M | L3 consensus_3 |
| 620 | X₁X₂X₃X₄X₅X₆X₇X₈X₉X₁₀, wherein X₁ is G, V, or R; | hu1C7.v2-like CDR- |
| | X₂ is F or I; X₃ is T, K, R, Q, M, or N; X₄ is F, | H1 consensus_4 |
| | W, or I; X₅ is S, R, E, or K; X₆ is S, R, G, I, | |
| | Q, M, L, K, or D; X₇ is Y, V, P, or D; X₈ is G or | |
| | Y; X₉ is M, V, or T; and X₁₀ is S or H | |
| 621 | SISGX₁X₂GSYIX₃YAX₄X₅VK, wherein X₁ is D, E, T, or | hu1C7.v2-like CDR- |
| | S; X₂ is G or A; X₃ is H or R; X₄ is D or S; and | H2 consensus_2 |
| | X₅ is S or A | |
| 622 | X₁X₂LX₃X₄, wherein X₁ is A, T,or N; X₂ is R, K, or | hu1C7.v2-like CDR- |
| | T; X₃ is P or R; and X₄ is Y or F | H3 consensus_2 |
| 623 | X₁X₂SX₃X₄X₅X₆, wherein X₁ is S, W, R, or L; X₂ is | hu1C7.v2-like CDR- |
| | A, M, or V; X₃ is Y, T, F, N, or K; X₄ is R, L, or | L2 consensus_1 |
| | K; X₅ is Y, H, A, or E; and X₆ is S or T | |
| 624 | X₁X₂X₃X₄X₅X₆PX₇T, wherein X₁ is Q, A, V, or P; X₂ | hu1C7.v2-like CDR- |
| | is Q, K, H, or L; X₃ is Y, M, G, or S; X₄ is N, D, | L3 consensus_4 |
| | R, Y, S, L, or T; X₅ is S, T, A, E, or H; X₆ is Y, | |
| | R, F, or D; and X₇ is L, M, or Y | |
| 625 | APELLGGPSVFLFPPKPKDTLMISRTPEVTCVVVDVSHEDPEVKFNWYVD | Fc sequence with |
| | GVEVHNAKTKPREEQYNSTYRVVSVLTVLHQDWLNGKEYKCKVSNKAL | M198L and N204S |
| | PAPIEKTISKAKGQPREPQVYTLPPSRDELTKNQVSLTCLVKGFYPSDIAVE | mutations |
| | WESNGQPENNYKTTPPVLDSDGSFFLYSKLTVDKSRWQQGNVFSCSVLH | |
| | EALHSHYTQKSLSLSPGK | |
| 626 | APELLGGPSVFLFPPKPKDTLMISRTPEVTCVVVDVSHEDPEVKFNWYVD | Fc sequence with |
| | GVEVHNAKTKPREEQYNSTYRVVSVLTVLHQDWLNGKEYKCKVSNKAL | knob and M198L and |
| | PAPIEKTISKAKGQPREPQVYTLPPSRDELTKNQVSLWCLVKGFYPSDIAV | N204S mutations |
| | EWESNGQPENNYKTTPPVLDSDGSFFLYSKLTVDKSRWQQGNVFSCSVL | |
| | HEALHSHYTQKSLSLSPGK | |
| 627 | APEAAGGPSVFLFPPKPKDTLMISRTPEVTCVVVDVSHEDPEVKFNWYVD | Fc sequence with |
| | GVEVHNAKTKPREEQYNSTYRVVSVLTVLHQDWLNGKEYKCKVSNKAL | knob, LALA, and |
| | PAPIEKTISKAKGQPREPQVYTLPPSRDELTKNQVSLWCLVKGFYPSDIAV | M198L and N204S |
| | EWESNGQPENNYKTTPPVLDSDGSFFLYSKLTVDKSRWQQGNVFSCSVL | mutations |
| | HEALHSHYTQKSLSLSPGK | |
| 628 | APEAAGGPSVFLFPPKPKDTLMISRTPEVTCVVVDVSHEDPEVKFNWYVD | Fc sequence with |
| | GVEVHNAKTKPREEQYNSTYRVVSVLTVLHQDWLNGKEYKCKVSNKAL | knob, LALAPG, and |
| | GAPIEKTISKAKGQPREPQVYTLPPSRDELTKNQVSLWCLVKGFYPSDIAV | M198L and N2045 |
| | EWESNGQPENNYKTTPPVLDSDGSFFLYSKLTVDKSRWQQGNVFSCSVL | mutations |
| | HEALHSHYTQKSLSLSPGK | |
| 629 | APELLGGPSVFLFPPKPKDTLMISRTPEVTCVVVDVSHEDPEVKFNWYVD | Fc sequence with hole |
| | GVEVHNAKTKPREEQYNSTYRVVSVLTVLHQDWLNGKEYKCKVSNKAL | and M198L and |
| | PAPIEKTISKAKGQPREPQVYTLPPSRDELTKNQVSLSCAVKGFYPSDIAVE | N204S mutations |
| | WESNGQPENNYKTTPPVLDSDGSFFLVSKLTVDKSRWQQGNVFSCSVLH | |
| | EALHSHYTQKSLSLSPGK | |
| 630 | APEAAGGPSVFLFPPKPKDTLMISRTPEVTCVVVDVSHEDPEVKFNWYVD | Fc sequence with |
| | GVEVHNAKTKPREEQYNSTYRVVSVLTVLHQDWLNGKEYKCKVSNKAL | hole, LALA, and |
| | PAPIEKTISKAKGQPREPQVYTLPPSRDELTKNQVSLSCAVKGFYPSDIAVE | M198L and N204S |
| | WESNGQPENNYKTTPPVLDSDGSFFLVSKLTVDKSRWQQGNVFSCSVLH | mutations |
| | EALHSHYTQKSLSLSPGK | |
| 631 | APEAAGGPSVFLFPPKPKDTLMISRTPEVTCVVVDVSHEDPEVKFNWYVD | Fc sequence with |
| | GVEVHNAKTKPREEQYNSTYRVVSVLTVLHQDWLNGKEYKCKVSNKAL | hole, LALAPG, and |
| | GAPIEKTISKAKGQPREPQVYTLPPSRDELTKNQVSLSCAVKGFYPSDIAV | M198L and N204S |
| | EWESNGQPENNYKTTPPVLDSDGSFFLVSKLTVDKSRWQQGNVFSCSVL | mutations |
| | HEALHSHYTQKSLSLSPGK | |
| 632 | AAGHV | Part of Tau epitope |
| | | TPSLEDEAAGHVT |
| | | QA |
| 633 | WASX₁RX₂S, wherein X₁ is T or Y and X₂ is E or Y | A light chain CDR2 |
| 634 | QQYX₁X₂YPLT, wherein X₁ is N or S and X₂ is S or T | a light chain CDR3 |
| 635 | YxTEWSS | Consensus sequence |
| 636 | TxxExxxxF | Consensus sequence |

1-205. (canceled)

206. An isolated antibody or antigen-binding portion thereof that specifically binds to a human Tau protein and recognizes an epitope within residues 111-125 of SEQ ID NO:1.

207. The isolated antibody of claim 206, comprising one or more complementarity determining regions (CDRs) selected from the group consisting of:
(a) a heavy chain CDR1 having at least 90% sequence identity to the amino acid sequence of SEQ ID NO:22 or having up to two amino acid substitutions relative to the amino acid sequence of SEQ ID NO:22;
(b) a heavy chain CDR2 having at least 90% sequence identity to the amino acid sequence of SEQ ID NO:23 or having up to two amino acid substitutions relative to the amino acid sequence of SEQ ID NO:23;
(c) a heavy chain CDR3 having at least 90% sequence identity to the amino acid sequence of SEQ ID NO:24 or having up to two amino acid substitutions relative to the amino acid sequence of SEQ ID NO:24;
(d) a light chain CDR1 having at least 90% sequence identity to the amino acid sequence of any one of SEQ ID NOS:26 and 42 or having up to two amino acid substitutions relative to the amino acid sequence of any one of SEQ ID NOS:26 and 42;
(e) a light chain CDR2 having at least 90% sequence identity to the amino acid sequence of any one of SEQ ID NOS:27, 43, and 50 or having up to two amino acid substitutions relative to the amino acid sequence of any one of SEQ ID NOS:27, 43, and 50; and
(f) a light chain CDR3 having at least 90% sequence identity to the amino acid sequence of any one of SEQ ID NOS:28, 44, 46, and 51 or having up to two amino acid substitutions relative to the amino acid sequence of any one of SEQ ID NOS:28, 44, 46, and 51.

208. The isolated antibody of claim 207, comprising:
(a) a heavy chain CDR1 comprising the amino acid sequence of SEQ ID NO:22, a heavy chain CDR2 comprising the amino acid sequence of SEQ ID NO:23, and a heavy chain CDR3 comprising the amino acid sequence of SEQ ID NO:24; or
(b) a light chain CDR1 comprising the amino acid sequence of SEQ ID NO:26, a light chain CDR2 comprising the amino acid sequence of SEQ ID NO:27, and a light chain CDR3 comprising the amino acid sequence of SEQ ID NO:28; or
(c) a heavy chain CDR1 comprising the amino acid sequence of SEQ ID NO:22, a heavy chain CDR2 comprising the amino acid sequence of SEQ ID NO:23, a heavy chain CDR3 comprising the amino acid sequence of SEQ ID NO:24, a light chain CDR1 comprising the amino acid sequence of SEQ ID NO:26, a light chain CDR2 comprising the amino acid sequence of SEQ ID NO:27, and a light chain CDR3 comprising the amino acid sequence of SEQ ID NO:28.

209. The isolated antibody of claim 206, comprising one or more complementarity determining regions (CDRs) selected from the group consisting of:
(a) a heavy chain CDR1 having at least 90% sequence identity to the amino acid sequence of any one of SEQ ID NOS:22, 150-154, 420-437, 586, 587, 617, and 620 or having up to two amino acid substitutions relative to the amino acid sequence of any one of SEQ ID NOS:22, 150-154, 420-437, 586, 587, 617, and 620;
(b) a heavy chain CDR2 having at least 90% sequence identity to the amino acid sequence of SEQ ID NO:23, 438-443, 588, and 621 or having up to two amino acid substitutions relative to the amino acid sequence of any one of SEQ ID NOS:23, 438-443, 588, and 621;
(c) a heavy chain CDR3 having at least 90% sequence identity to the amino acid sequence of any one of SEQ ID NOS:24, 155, and 622 or having up to two amino acid substitutions relative to the amino acid sequence of any one of SEQ ID NOS:24, 155, and 622;
(d) a light chain CDR1 having at least 90% sequence identity to the amino acid sequence of any one of SEQ ID NOS:26, 156-158, 444-459, and 618 or having up to two amino acid substitutions relative to the amino acid sequence of any one of SEQ ID NOS:26, 156-158, 444-459, and 618;
(e) a light chain CDR2 having at least 90% sequence identity to the amino acid sequence of SEQ ID NO:27 and 623 or having up to two amino acid substitutions relative to the amino acid sequence of SEQ ID NO:27 and 623; and
(f) a light chain CDR3 having at least 90% sequence identity to the amino acid sequence of any one of SEQ ID NOS:28, 159-162, 460-462, 619, and 624 or having up to two amino acid substitutions relative to the amino acid sequence of any one of SEQ ID NOS:28, 159-162, 460-462, 619, and 624.

210. The isolated antibody of claim 209, comprising one or more CDRs selected from the group consisting of:
(a) a heavy chain CDR1 comprising the amino acid sequence of any one of SEQ ID NOS:22, 150-154, 420-437, 586, 587, 617, and 620, a heavy chain CDR2 comprising the amino acid sequence of any one of SEQ ID NOS:23, 438-443, 588, and 621, and a heavy chain CDR3 comprising the amino acid sequence of any one of SEQ ID NOS:24, 155, and 622; or
(b) a light chain CDR1 comprising the amino acid sequence of any one of SEQ ID NOS:26, 156-158, 444-459, and 618, a light chain CDR2 comprising the amino acid sequence of SEQ ID NO:27 and 623, and a light chain CDR3 comprising the amino acid sequence of any one of SEQ ID NOS:28, 159-162, 460-462, 619, and 624.

211. The isolated antibody of claim 209, comprising one or more CDRs selected from the group consisting of:
(a) a heavy chain CDR1 comprising the amino acid sequence of SEQ ID NO:586, a heavy chain CDR2 comprising the amino acid sequence of SEQ ID NO:439, a heavy chain CDR3 comprising the amino acid sequence of SEQ ID NO:24, a light chain CDR1 comprising the amino acid sequence of SEQ ID NO:450, a light chain CDR2 comprising the amino acid sequence of SEQ ID NO:27, and a light chain CDR3 comprising the amino acid sequence of SEQ ID NO:461; or
(b) a heavy chain CDR1 comprising the amino acid sequence of SEQ ID NO:586, a heavy chain CDR2 comprising the amino acid sequence of SEQ ID NO:439, a heavy chain CDR3 comprising an amino acid sequence having up to one amino acid substitution relative to the amino acid sequence of SEQ ID NO:24, a light chain CDR1 comprising the amino acid sequence of SEQ ID NO:450, a light chain CDR2 comprising the amino acid sequence of SEQ ID NO:27, and a light chain CDR3 comprising the amino acid sequence of SEQ ID NO:461; or
(c) a heavy chain CDR1 comprising the amino acid sequence of SEQ ID NO:586, a heavy chain CDR2 comprising the amino acid sequence of SEQ ID NO:439, a heavy chain CDR3 comprising the amino acid sequence of SEQ ID NO:24, a light chain CDR1 comprising an amino acid sequence having up to one amino acid substitution relative to the amino acid sequence of SEQ ID NO:450, a light chain CDR2 comprising the amino acid sequence of SEQ ID NO:27, and a light chain CDR3 comprising the amino acid sequence of SEQ ID NO:461; or
(d) a heavy chain CDR1 comprising the amino acid sequence of SEQ ID NO:22, a heavy chain CDR2 comprising the amino acid sequence of SEQ ID NO:23, a heavy chain CDR3 comprising the amino acid sequence of SEQ ID NO:24, a light chain CDR1 comprising the amino acid sequence of SEQ ID NO:450, a light chain CDR2 comprising the amino acid sequence of SEQ ID NO:27, and a light chain CDR3 comprising the amino acid sequence of SEQ ID NO:461; or
(e) a heavy chain CDR1 comprising the amino acid sequence of SEQ ID NO:22, a heavy chain CDR2 comprising the amino acid sequence of SEQ ID NO:23, a heavy chain CDR3 comprising the amino acid sequence of SEQ ID NO:24, a light chain CDR1 comprising the amino acid sequence of SEQ ID NO:459, a light chain CDR2 comprising the amino acid sequence of SEQ ID NO:27, and a light chain CDR3 comprising the amino acid sequence of SEQ ID NO:461; or
(f) a heavy chain CDR1 comprising the amino acid sequence of SEQ ID NO:151, a heavy chain CDR2 comprising the amino acid sequence of SEQ ID NO:23, a heavy chain CDR3 comprising the amino acid sequence of SEQ ID NO:24, a light chain CDR1 comprising the amino acid sequence of SEQ ID NO:26, a light chain CDR2 comprising the amino acid sequence of SEQ ID NO:27, and a light chain CDR3 comprising the amino acid sequence of SEQ ID NO:28; or
(g) a heavy chain CDR1 comprising the amino acid sequence of SEQ ID NO:151, a heavy chain CDR2 comprising the amino acid sequence of SEQ ID NO:23, a heavy chain CDR3 comprising the amino acid sequence of SEQ ID NO:24, a light chain CDR1 comprising the amino acid sequence of SEQ ID NO: 156, a light chain CDR2 comprising the amino acid sequence of SEQ ID NO:27, and a light chain CDR3 comprising the amino acid sequence of SEQ ID NO:28; or
(h) a heavy chain CDR1 comprising the amino acid sequence of SEQ ID NO:151, a heavy chain CDR2 comprising the amino acid sequence of SEQ ID NO:23, a heavy chain CDR3 comprising the amino acid sequence of SEQ ID NO:24, a light chain CDR1 comprising the amino acid sequence of SEQ ID NO: 158, a light chain CDR2 comprising the amino acid sequence of SEQ ID NO:27, and a light chain CDR3 comprising the amino acid sequence of SEQ ID NO:28; or
(i) a heavy chain CDR1 comprising the amino acid sequence of SEQ ID NO:22, a heavy chain CDR2 comprising the amino acid sequence of SEQ ID NO:23, a heavy chain CDR3 comprising the amino acid sequence of SEQ ID NO:24, a light chain CDR1 comprising the amino acid sequence of SEQ ID NO: 158, a light chain CDR2 comprising the amino acid sequence of SEQ ID NO:27, and a light chain CDR3 comprising the amino acid sequence of SEQ ID NO:28; or
(j) a heavy chain CDR1 comprising the amino acid sequence of SEQ ID NO:150, a heavy chain CDR2 comprising the amino acid sequence of SEQ ID NO:23, a heavy chain CDR3 comprising the amino acid sequence of SEQ ID NO:24, a light chain CDR1 comprising the amino acid sequence of SEQ ID NO: 158, a light chain CDR2 comprising the amino acid sequence of SEQ ID NO:27, and a light chain CDR3 comprising the amino acid sequence of SEQ ID NO:28; or
(k) a heavy chain CDR1 comprising the amino acid sequence of SEQ ID NO:153, a heavy chain CDR2 comprising the amino acid sequence of SEQ ID NO:23, a heavy chain CDR3 comprising the amino acid sequence of SEQ ID NO:24, a light chain CDR1 comprising the amino acid sequence of SEQ ID NO: 158, a light chain CDR2 comprising the amino acid sequence of SEQ ID NO:27, and a light chain CDR3 comprising the amino acid sequence of SEQ ID NO:28; or
(l) a heavy chain CDR1 comprising the amino acid sequence of SEQ ID NO:154, a heavy chain CDR2 comprising the amino acid sequence of SEQ ID NO:23, a heavy chain CDR3 comprising the amino acid sequence of SEQ ID NO:24, a light chain CDR1 comprising the amino acid sequence of SEQ ID NO: 158, a light chain CDR2 comprising the amino acid sequence of SEQ ID NO:27, and a light chain CDR3 comprising the amino acid sequence of SEQ ID NO:28; or
(m) a heavy chain CDR1 comprising the amino acid sequence of SEQ ID NO:22, a heavy chain CDR2 comprising the amino acid sequence of SEQ ID NO:23, a heavy chain CDR3 comprising the amino acid sequence of SEQ ID NO: 155, a light chain CDR1 comprising the amino acid sequence of SEQ ID NO: 158, a light chain CDR2 comprising the amino acid sequence of SEQ ID NO:27, and a light chain CDR3 comprising the amino acid sequence of SEQ ID NO:28; or
(n) a heavy chain CDR1 comprising the amino acid sequence of SEQ ID NO:150, a heavy chain CDR2 comprising the amino acid sequence of SEQ ID NO:23, a heavy chain CDR3 comprising the amino acid sequence of SEQ ID NO: 155, a light chain CDR1 comprising the amino acid sequence of SEQ ID NO: 158, a light chain CDR2 comprising the amino acid sequence of SEQ ID NO:27, and a light chain CDR3 comprising the amino acid sequence of SEQ ID NO:28; or
(o) a heavy chain CDR1 comprising the amino acid sequence of SEQ ID NO:151, a heavy chain CDR2 comprising the amino acid sequence of SEQ ID NO:23, a heavy chain CDR3 comprising the amino acid sequence of SEQ ID NO: 155, a light chain CDR1 comprising the amino acid sequence of SEQ ID NO: 158, a light chain CDR2 comprising the amino acid sequence of SEQ ID NO:27, and a light chain CDR3 comprising the amino acid sequence of SEQ ID NO:28; or
(p) a heavy chain CDR1 comprising the amino acid sequence of SEQ ID NO:153, a heavy chain CDR2 comprising the amino acid sequence of SEQ ID NO:23, a heavy chain CDR3 comprising the amino acid sequence of SEQ ID NO: 155, a light chain CDR1 comprising the amino acid sequence of SEQ ID NO: 158, a light chain CDR2 comprising the amino acid sequence of SEQ ID NO:27, and a light chain CDR3 comprising the amino acid sequence of SEQ ID NO:28; or
(q) a heavy chain CDR1 comprising the amino acid sequence of SEQ ID NO:154, a heavy chain CDR2 comprising the amino acid sequence of SEQ ID NO:23, a heavy chain CDR3 comprising the amino acid sequence of SEQ ID NO: 155, a light chain CDR1 comprising the amino acid sequence of SEQ ID NO: 158, a light chain CDR2 comprising the amino acid sequence of SEQ ID NO:27, and a light chain CDR3 comprising the amino acid sequence of SEQ ID NO:28.

212. The isolated antibody of claim 206, comprising:
(a) a heavy chain variable region comprising an amino acid sequence that has at least 90% sequence identity to SEQ ID NO:21 and a light chain variable region comprising an amino acid sequence that has at least 90% sequence identity to SEQ ID NO:25; or
(b) a heavy chain variable region comprising an amino acid sequence that has at least 90% sequence identity to SEQ ID NO: 145 and a light chain variable region comprising an amino acid sequence that has at least 90% sequence identity to SEQ ID NO: 149; or
(c) a heavy chain variable region comprising an amino acid sequence that has at least 90% sequence identity to SEQ ID NO: 146 and a light chain variable region comprising an amino acid sequence that has at least 90% sequence identity to SEQ ID NO: 149; or
(d) a heavy chain variable region comprising an amino acid sequence that has at least 90% sequence identity to SEQ ID NO: 147 and a light chain variable region comprising an amino acid sequence that has at least 90% sequence identity to SEQ ID NO: 149; or
(e) a heavy chain variable region comprising an amino acid sequence that has at least 90% sequence identity to SEQ ID NO: 148 and a light chain variable region comprising an amino acid sequence that has at least 90% sequence identity to SEQ ID NO: 149; or
(f) a heavy chain variable region comprising an amino acid sequence that has at least 90% sequence identity to SEQ ID NO: 146 and a light chain variable region comprising an amino acid sequence that has at least 90% sequence identity to SEQ ID NO:463; or
(g) a heavy chain variable region comprising an amino acid sequence that has at least 90% sequence identity to SEQ ID NO: 146 and a light chain variable region comprising an amino acid sequence that has at least 90% sequence identity to SEQ ID NO:464.

213. The isolated antibody of claim 206, comprising:
(a) one or more CDRs selected from the group consisting of a heavy chain CDR1 comprising the amino acid sequence of SEQ ID NO:586, a heavy chain CDR2 comprising the amino acid sequence of SEQ ID NO:588, a heavy chain CDR3 comprising the amino acid sequence of SEQ ID NO:24, a light chain CDR1 comprising the amino acid sequence of SEQ ID NO:158, a light chain CDR2 comprising the amino acid sequence of SEQ ID NO:27, and a light chain CDR3 comprising the amino acid sequence of SEQ ID NO:28; or
(b) one or more CDRs selected from the group consisting of: a heavy chain CDR1 comprising the amino acid sequence of SEQ ID NO:586, a heavy chain CDR2 comprising the amino acid sequence of SEQ ID NO:588, a heavy chain CDR3 comprising the amino acid sequence of SEQ ID NO:24, a light chain CDR1 comprising the amino acid sequence of SEQ ID NO:158, a light chain CDR2 comprising the amino acid sequence of SEQ ID NO:27, and a light chain CDR3 comprising the amino acid sequence of SEQ ID NO:461; or
(c) one or more CDRs selected from the group consisting of: a heavy chain CDR1 comprising the amino acid sequence of SEQ ID NO:586, a heavy chain CDR2 comprising the amino acid sequence of SEQ ID NO:588, a heavy chain CDR3 comprising the amino acid sequence of SEQ ID NO:24, a light chain CDR1 comprising the amino acid sequence of SEQ ID NO:450, a light chain CDR2 comprising the amino acid sequence of SEQ ID NO:27, and a light chain CDR3 comprising the amino acid sequence of SEQ ID NO:461; or
(d) one or more CDRs selected from the group consisting of: a heavy chain CDR1 comprising the amino acid sequence of SEQ ID NO:586, a heavy chain CDR2 comprising an amino acid sequence having up to one amino acid substitution relative to the amino acid sequence of SEQ ID NO:588, a heavy chain CDR3 comprising the amino acid sequence of SEQ ID NO:24, a light chain CDR1 comprising the amino acid sequence of SEQ ID NO:450, a light chain CDR2 comprising the amino acid sequence of SEQ ID NO:27, and a light chain CDR3 comprising the amino acid sequence of SEQ ID NO:461; or
(e) one or more CDRs selected from the group consisting of: a heavy chain CDR1 comprising the amino acid sequence of SEQ ID NO:586, a heavy chain CDR2 comprising an amino acid sequence having up to one amino acid substitution relative to the amino acid sequence of SEQ ID NO:588, a heavy chain CDR3 comprising an amino acid sequence having up to one amino acid substitution relative to the amino acid sequence of SEQ ID NO:24, a light chain CDR1 comprising the amino acid sequence of SEQ ID NO:450, a light chain CDR2 comprising the amino acid sequence of SEQ ID NO:27, and a light chain CDR3 comprising the amino acid sequence of SEQ ID NO:461; or
(f) one or more CDRs selected from the group consisting of: a heavy chain CDR1 comprising the amino acid sequence of SEQ ID NO:586, a heavy chain CDR2 comprising an amino acid sequence having up to one amino acid substitution relative to the amino acid sequence of SEQ ID NO:588, a heavy chain CDR3 comprising the amino acid sequence of SEQ ID NO:24, a light chain CDR1 comprising an amino acid sequence having up to one amino acid substitution relative to the amino acid sequence of SEQ ID NO:450, a light chain CDR2 comprising the amino acid sequence of SEQ ID NO:27, and a light chain CDR3 comprising the amino acid sequence of SEQ ID NO:461; or
(g) one or more CDRs selected from the group consisting of: a heavy chain CDR1 comprising the amino acid sequence of SEQ ID NO:587, a heavy chain CDR2 comprising the amino acid sequence of SEQ ID NO:588 a heavy chain CDR3 comprising the amino acid sequence of SEQ ID NO:24, a light chain CDR1 comprising the amino acid sequence of SEQ ID NO:158, a light chain CDR2 comprising the amino acid sequence of SEQ ID NO:27, and a light chain CDR3 comprising the amino acid sequence of SEQ ID NO:28; or
(h) one or more CDRs selected from the group consisting of: a heavy chain CDR1 comprising the amino acid sequence of SEQ ID NO:587, a heavy chain CDR2 comprising the amino acid sequence of SEQ ID NO:588, a heavy chain CDR3 comprising the amino acid sequence of SEQ ID NO:24, a light chain CDR1 comprising the amino acid sequence of SEQ ID NO:158, a light chain CDR2 comprising the amino acid sequence of SEQ ID NO:27, and a light chain CDR3 comprising the amino acid sequence of SEQ ID NO:461; or
(i) one or more CDRs selected from the group consisting of: a heavy chain CDR1 comprising the amino acid sequence of SEQ ID NO:587, a heavy chain CDR2 comprising the amino acid sequence of SEQ ID NO:588, a heavy chain CDR3 comprising the amino acid sequence of SEQ ID NO:24, a light chain CDR1 comprising the amino acid sequence of SEQ ID NO:450, a light chain CDR2 comprising the amino acid sequence of SEQ ID NO:27, and a light chain CDR3 comprising the amino acid sequence of SEQ ID NO:461.

214. The isolated antibody of claim 213, comprising:
(a) a heavy chain variable region comprising an amino acid sequence that has at least 90% sequence identity to SEQ ID NO:602 and a light chain variable region comprising an amino acid sequence that has at least 90% sequence identity to SEQ ID NO:604; or
(b) a heavy chain variable region comprising an amino acid sequence that has at least 90% sequence identity to SEQ ID NO:602 and a light chain variable region comprising an amino acid sequence that has at least 90% sequence identity to SEQ ID NO:616; or
(c) a heavy chain variable region comprising an amino acid sequence that has at least 90% sequence identity to SEQ ID NO:602 and a light chain variable region comprising an amino acid sequence that has at least 90% sequence identity to SEQ ID NO:463; or
(d) a heavy chain variable region comprising an amino acid sequence that has at least 90% sequence identity to SEQ ID NO:603 and a light chain variable region comprising an amino acid sequence that has at least 90% sequence identity to SEQ ID NO:604; or
(e) a heavy chain variable region comprising an amino acid sequence that has at least 90% sequence identity to SEQ ID NO:603 and a light chain variable region comprising an amino acid sequence that has at least 90% sequence identity to SEQ ID NO:616; or
(f) a heavy chain variable region comprising an amino acid sequence that has at least 90% sequence identity to SEQ ID NO:603 and a light chain variable region comprising an amino acid sequence that has at least 90% sequence identity to SEQ ID NO:463.

215. The isolated antibody of claim 206, wherein the antibody comprises:
(a) a first antigen-binding portion comprising a first variable region that specifically binds to the human Tau protein, wherein the first antigen-binding portion comprises (i) a first heavy chain comprising a first Fc polypeptide and (ii) a first light chain; and
(b) a second antigen-binding portion comprising a second variable region that specifically binds to the human Tau protein, wherein the second antigen-binding portion comprises (i) a second heavy chain comprising a second Fc polypeptide and (ii) a second light chain, wherein the first Fc polypeptide and the second Fc polypeptide form an Fc dimer.

216. The isolated antibody of claim 206, wherein the antibody or antigen-binding portion thereof specifically binds to the human Tau protein with a binding affinity of less than about 50 nM.

217. The isolated antibody of claim 206, wherein:
(a) the antibody or antigen-binding portion thereof specifically binds to a phosphorylated human Tau protein and/or an unphosphorylated human Tau protein; and/or
(b) the antibody or antigen-binding portion thereof specifically binds to two or more isoforms of the human Tau protein selected from the group consisting of 2N4R, 2N3R, 1N4R, 1N3R, 0N4R, and 0N3R; and/or
(c) the antibody or antigen-binding portion thereof exhibits cross-reactivity with a cynomolgus monkey Tau protein and/or a mouse Tau protein.

218. The isolated antibody of claim 206, wherein:
(a) the antibody is a monoclonal antibody; and/or
(b) the antibody is a chimeric antibody; and/or
(c) the antibody is a humanized antibody; or
(d) the antibody is a fully human antibody.

219. The isolated antibody of claim 206, wherein the antigen-binding portion is a Fab, a F(ab′)2, a scFv, or a bivalent scFv.

220. An isolated polynucleotide comprising a nucleotide sequence encoding the isolated antibody of claim 206.

221. An antibody that competes with the isolated antibody of claim 206 for binding to the human Tau protein.

222. A method of preventing or reducing pathological Tau seeding and/or spreading in a brain of a subject and/or for treating a neurodegenerative disease of a subject, the method comprising administering to the subject the isolated antibody of claim 206.

223. The method of claim 222, wherein the neurodegenerative disease is a tauopathy.

224. The method of claim 223, wherein the tauopathy is a neurodegenerative tauopathy.

225. The method of claim 224, wherein the neurodegenerative tauopathy is selected from the group consisting of Alzheimer's disease, primary age-related tauopathy, progressive supranuclear palsy (PSP), frontotemporal dementia, frontotemporal dementia with parkinsonism linked to chromosome 17, argyrophilic grain dementia, amyotrophic lateral sclerosis/parkinsonism-dementia complex of Guam, corticobasal degeneration, chronic traumatic encephalopathy, Creutzfeldt-Jakob disease, dementia pugilistica, diffuse neurofibrillary tangles with calcification, Down's syndrome, familial British dementia, familial Danish dementia, Gerstmann-Straussler-Scheinker disease, globular glial tauopathy, Guadeloupean parkinsonism with dementia, Guadelopean PSP, Hallevorden-Spatz disease, inclusion-body myositis, multiple system atrophy, myotonic dystrophy, neurofibrillary tangle-predominant dementia, Niemann-Pick disease type C, pallido-ponto-nigral degeneration, Parkinson's disease, Pick's disease, postencephalitic parkinsonism, prion protein cerebral amyloid angiopathy, progressive subcortical gliosis, subacute sclerosing panencephalitis, Huntington's disease, and tangle only dementia.

The application's sequence listing, which the Patent Office published only in electronic form, follows.

SEQUENCE LISTING (636 sequences)

SEQ ID NO: 1 - protein, 441 aa, Homo sapiens
MAEPRQEFEVMEDHAGTYGLGDRKDQGGYTMHQDQEGDTDAGLKESPLQTPTEDGSEEPGSETSDAKSTPTAEDVTAPLVDEGAPGKQAAAQPHTEIPEGTTAEEAGIGDTPSLEDEAAGHVTQARMVSKSKDGTGSDDKKAKGADGKTKIATPRGAAPPGQKGQANATRIPAKTPPAPKTPPSSGEPPKSGDRSGYSSPGSPGTPGSRSRTPSLPTPPTREPKKVAVVRTPPKSPSSAKSRLQTAPVPMPDLKNVKSKIGSTENLKHQPGGGKVQIINKKLDLSNVQSKCGSKDNIKHVPGGGSVQIVYKPVDLSKVTSKCGSLGNIHHKPGGGQVEVKSEKLDFKDRVQSKIGSLDNITHVPGGGNKKIETHKLTFRENAKAKTDHGAEIVYKSPVVSGDTSPRHLSNVSSTGSIDMVDSPQLATLADEVSASLAKQGL

SEQ ID NO: 2 - protein, 97 aa, Artificial Sequence
  Synthetic construct
MGHHHHHHSGEVKPEVKPETHINLKVSDGSSEIFFKIKKTTPLRRLMEAFAKRQGKEMDSLRFLYDGIRIQADQTPEDLDMEDNDIIEAHREQIGGS

SEQ ID NO: 3 - protein, 538 aa, Artificial Sequence
  Synthetic construct
MGHHHHHHSGEVKPEVKPETHINLKVSDGSSEIFFKIKKTTPLRRLMEAFAKRQGKEMDSLRFLYDGIRIQADQTPEDLDMEDNDIIEAHREQIGGSMAEPRQEFEVMEDHAGTYGLGDRKDQGGYTMHQDQEGDTDAGLKESPLQTPTEDGSEEPGSETSDAKSTPTAEDVTAPLVDEGAPGKQAAAQPHTEIPEGTTAEEAGIGDTPSLEDEAAGHVTQARMVSKSKDGTGSDDKKAKGADGKTKIATPRGAAPPGQKGQANATRIPAKTPPAPKTPPSSGEPPKSGDRSGYSSPGSPGTPGSRSRTPSLPTPPTREPKKVAVVRTPPKSPSSAKSRLQTAPVPMPDLKNVKSKIGSTENLKHQPGGGKVQIINKKLDLSNVQSKCGSKDNIKHVPGGGSVQIVYKPVDLSKVTSKCGSLGNIHHKPGGGQVEVKSEKLDFKDRVQSKIGSLDNITHVPGGGNKKIETHKLTFRENAKAKTDHGAEIVYKSPVVSGDTSPRHLSNVSSTGSIDMVDSPQLATLADEVSASLAKQGL

SEQ ID NO: 4 - protein, 421 aa, Artificial Sequence
  Synthetic construct
MAEPRQEFEVMEDHAGTYGLGDRKDQGGYTMHQDQEGDTDAGLKESPLQTPTEDGSEEPGSETSDAKSTPTAEDVTAPLVDEGAPGKQAAAQPHTEIPEGTTAEEAGIGDTPSLEDEAAGHVTQARMVSKSKDGTGSDDKKAKGADGKTKIATPRGAAPPGQKGQANATRIPAKTPPAPKTPPSSGEPPKSGDRSGYSSPGSPGTPGSRSRTPSLPTPPTREPKKVAVVRTPPKSPSSAKSRLQTAPVPMPDLKNVKSKIGSTENLKHQPGGGKVQIINKKLDLSNVQSKCGSKDNIKHVPGGGSVQIVYKPVDLSKVTSKCGSLGNIHHKPGGGQVEVKSEKLDFKDRVQSKIGSLDNITHVPGGGNKKIETHKLTFRENAKAKTDHGAEIVYKSPVVSGDTSPRHLSNVSSTGSIDMVD

SEQ ID NO: 5 - protein, 392 aa, Artificial Sequence
  Synthetic construct
TPTEDGSEEPGSETSDAKSTPTAEDVTAPLVDEGAPGKQAAAQPHTEIPEGTTAEEAGIGDTPSLEDEAAGHVTQARMVSKSKDGTGSDDKKAKGADGKTKIATPRGAAPPGQKGQANATRIPAKTPPAPKTPPSSGEPPKSGDRSGYSSPGSPGTPGSRSRTPSLPTPPTREPKKVAVVRTPPKSPSSAKSRLQTAPVPMPDLKNVKSKIGSTENLKHQPGGGKVQIINKKLDLSNVQSKCGSKDNIKHVPGGGSVQIVYKPVDLSKVTSKCGSLGNIHHKPGGGQVEVKSEKLDFKDRVQSKIGSLDNITHVPGGGNKKIETHKLTFRENAKAKTDHGAEIVYKSPVVSGDTSPRHLSNVSSTGSIDMVDSPQLATLADEVSASLAKQGL

SEQ ID NO: 6 - protein, 430 aa, Mus musculus
MADPRQEFDTMEDHAGDYTLLQDQEGDMDHGLKESPPQPPADDGAEEPGSETSDAKSTPTAEDVTAPLVDERAPDKQAAAQPHTEIPEGITAEEAGIGDTPNQEDQAAGHVTQARVASKDRTGNDEKKAKGADGKTGAKIATPRGAASPAQKGTSNATRIPAKTTPSPKTPPGSGEPPKSGERSGYSSPGSPGTPGSRSRTPSLPTPPTREPKKVAVVRTPPKSPSASKSRLQTAPVPMPDLKNVRSKIGSTENLKHQPGGGKVQIINKKLDLSNVQSKCGSKDNIKHVPGGGSVQIVYKPVDLSKVTSKCGSLGNIHHKPGGGQVEVKSEKLDFKDRVQSKIGSLDNITHVPGGGNKKIETHKLTFRENAKAKTDHGAEIVYKSPVVSGDTSPRHLSNVSSTGSIDMVDSPQLATLADEVSASLAKQGL

SEQ ID NO: 7 - protein, 441 aa, Macaca fascicularis
MAEPRQEFDVMEDHAGTYGLGDRKDQEGYTMLQDQEGDTDAGLKESPLQTPAEDGSEELGSETSDAKSTPTAEDVTAPLVDERAPGEQAAAQPHMEIPEGTTAEEAGIGDTPSLEDEAAGHVTQARMVSKSKDGTGSDDKKAKGADGKTKIATPRGAAPPGQKGQANATRIPAKTPPAPKTPPSSGEPPKSGDRSGYSSPGSPGTPGSRSRTPSLPTPPAREPKKVAVVRTPPKSPSSAKSRLQTAPVPMPDLKNVKSKIGSTENLKHQPGGGKVQIINKKLDLSNVQSKCGSKDNIKHVPGGGSVQIVYKPVDLSKVTSKCGSLGNIHHKPGGGQVEVKSEKLDFKDRVQSKIGSLDNITHVPGGGNKKIETHKLTFRENAKAKTDHGAEIVYKSPVVSGDTSPRHLSNVSSTGSIDMVDSPQLATLADEVSASLAKQGL

SEQ ID NO: 8 - protein, 115 aa, Artificial Sequence
  Synthetic construct
EVQLQQSGAELVRPGASVRLSCTASGFNIKDSLMHWLKQRPEQGLEWIGWIDPEDGETKYAPKFQDKATITADTSSNTAYLQLSSLTSEDTAIYYCTRRDWEGPWGQGTLVTVSA

SEQ ID NO: 9 - protein, 10 aa, Artificial Sequence
  Synthetic construct
GFNIKDSLMH

SEQ ID NO: 10 - protein, 17 aa, Artificial Sequence
  Synthetic construct
WIDPEDGETKYAPKFQD

SEQ ID NO: 11 - protein, 8 aa, Artificial Sequence
  Synthetic construct
TRRDWEGP

SEQ ID NO: 12 - protein, 113 aa, Artificial Sequence
  Synthetic construct
DIVMTQTPLTLSVTIGQPASISCKSSQSLLYSDGKTYLNWLLQSPGQSPKLLIYLVSKLESGVPDRFSGSGSGTDFTLKISRVEAEDLGVYYCVQGTHFPFTFGSGTKLEIKR

SEQ ID NO: 13 - protein, 16 aa, Artificial Sequence
  Synthetic construct
KSSQSLLYSDGKTYLN

SEQ ID NO: 14 - protein, 7 aa, Artificial Sequence
  Synthetic construct
LVSKLES

SEQ ID NO: 15 - protein, 9 aa, Artificial Sequence
  Synthetic construct
VQGTHFPFT

SEQ ID NO: 16 - protein, 114 aa, Artificial Sequence
  Synthetic construct
EVQLQQSGAELVRPGASVKLSCTASGFNIKDSLIHWVKQRPEQGLEWIGWIDPEDGETKYAPKFQDKATKTADTSSNTAYLQLSSLTSEDTAIYYCASGEWDYWGQGTSVTVSS

SEQ ID NO: 17 - protein, 10 aa, Artificial Sequence
  Synthetic construct
GFNIKDSLIH

SEQ ID NO: 18 - protein, 7 aa, Artificial Sequence
  Synthetic construct
ASGEWDY

SEQ ID NO: 19 - protein, 113 aa, Artificial Sequence
  Synthetic construct
DVVMTQTPLTLSVTIGQPASISCKSSQSLLYSDGKTYLNWLLQSPGQSPKLLIYLVSKLESGVPDRFSGSGSGTDFTLKISRVEAEDLGVYYCVQGTHFPYTFGGGTKLELKR

SEQ ID NO: 20 - protein, 9 aa, Artificial Sequence
  Synthetic construct
VQGTHFPYT

SEQ ID NO: 21 - protein, 113 aa, Artificial Sequence
  Synthetic construct
EVKLVESGGGLVKPGGSLKLSCAASGFTFSSYGMSWVRQTPEKRLEWVASISGDGGSYIHYADSVKGRFTISRDSAKNTLYLQMSSLRSEDTALYYCARLPYWGQGTLVTVSA

SEQ ID NO: 22 - protein, 10 aa, Artificial Sequence
  Synthetic construct
GFTFSSYGMS

SEQ ID NO: 23 - protein, 17 aa, Artificial Sequence
  Synthetic construct
SISGDGGSYIHYADSVK

SEQ ID NO: 24 - protein, 5 aa, Artificial Sequence
  Synthetic construct
ARLPY

SEQ ID NO: 25 - protein, 114 aa, Artificial Sequence
  Synthetic construct
DIVMTQSPSSLTVTAGEKVTMSCKSSQSLLNSGNQKNYLTWYQQKPGQPPKLLIYWASTRESGVPDRFTGSGSGTDFTLTISNVQSEDLAEYFCQQYNSYPLTFGAGTKLELKR

SEQ ID NO: 26 - protein, 17 aa, Artificial Sequence
  Synthetic construct
KSSQSLLNSGNQKNYLT

SEQ ID NO: 27 - protein, 7 aa, Artificial Sequence
  Synthetic construct
WASTRES

SEQ ID NO: 28 - protein, 9 aa, Artificial Sequence
  Synthetic construct
QQYNSYPLT

SEQ ID NO: 29 - protein, 116 aa, Artificial Sequence
  Synthetic construct
EVQLQQSGAELVRPGASVKLSCTASGFNIKDSLMHWMKQRPEQGLEWIGWIDPEDGETKYAPKFQDKATLTADTSSNAAYLQLSSLTSEDTAIYYCVRGDWDGGYWGQGTTLTVSS

SEQ ID NO: 30 - protein, 9 aa, Artificial Sequence
  Synthetic construct
VRGDWDGGY

SEQ ID NO: 31 - protein, 113 aa, Artificial Sequence
  Synthetic construct
DVVMTQTPLSLSVTIGQPASISCKSSQSLLYSDGKTYLNWLQQRPGQSPKLLIYLVSKLESGVPDRFSGSGSGTDFTLKISRVEAEDLGVYYCVQGTHFPYTFGGGTKLELKR

SEQ ID NO: 32 - protein, 115 aa, Artificial Sequence
  Synthetic construct
EVQLQQSGAEVVRPGASVKLSCTTSGFNIKDSLMHWLKQRPEQGLEWIGWIDPEDGETKYAPKFQDKATITADTSSNTAYLQLSSLTSGDTAIYYCARRDWEGPWGQGTLVTVSA

SEQ ID NO: 33 - protein, 8 aa, Artificial Sequence
  Synthetic construct
ARRDWEGP

SEQ ID NO: 34 - protein, 113 aa, Artificial Sequence
  Synthetic construct
DIVMTQTPLTLSVTIGQPASISCKSSQSLLYSDGKTYLNWLLQSPGQSPKLLIYLVSKLESGVPDRFSGSGSGTDFTLKISRVEAEDLGVYYCVQGTHFPYTFGGGTKLELKR

SEQ ID NO: 35 - protein, 15 aa, Artificial Sequence
  Synthetic construct
TPSLEDEAAGHVTQA

SEQ ID NO: 36 - protein, 20 aa, Artificial Sequence
  Synthetic construct
PDLKNVKSKIGSTENLKHQP

SEQ ID NO: 37 - protein, 15 aa, Artificial Sequence
  Synthetic construct
VKSKIGSTENLKHQP

SEQ ID NO: 38 - protein, 15 aa, Artificial Sequence
  Synthetic construct
FKDRVQSKIGSLDNI

SEQ ID NO: 39 - protein, 5 aa, Artificial Sequence
  Synthetic construct
SKIGS

SEQ ID NO: 40 - protein, 113 aa, Artificial Sequence; identical to SEQ ID NO: 21
  Synthetic construct

SEQ ID NO: 41 - protein, 108 aa, Artificial Sequence
  Synthetic construct
DIVMTQSQKFMSTSVGDRVSVTCKASQNVGTNVAWYQQKPGQSPKALIYSASYRYSGVPDRFTGSGSGTDFTLTISNVQSEDLAEYFCQQYNTYPLTFGAGTKLELKR

SEQ ID NO: 42 - protein, 11 aa, Artificial Sequence
  Synthetic construct
KASQNVGTNVA

SEQ ID NO: 43 - protein, 7 aa, Artificial Sequence
  Synthetic construct
SASYRYS

SEQ ID NO: 44 - protein, 9 aa, Artificial Sequence
  Synthetic construct
QQYNTYPLT

SEQ ID NO: 45 - protein, 108 aa, Artificial Sequence
  Synthetic construct
DIVMTQSQKFISTSVGDRVSITCKASQNVGTNVAWYQQKPGQSPKALIYSASYRYSGVPDRFTGSGSGTDFTLTISNVQSEDLADYFCQQYSSYPLTFGAGTKLEIKR

SEQ ID NO: 46 - protein, 9 aa, Artificial Sequence
  Synthetic construct
QQYSSYPLT

SEQ ID NO: 47 - protein, 10 aa, Artificial Sequence
  Synthetic construct
  misc_feature (9)..(9): Xaa can be any naturally occurring amino acid
GFNIKDSLXH

SEQ ID NO: 48 - protein, 8 aa, Artificial Sequence
  Synthetic construct
  misc_feature (1)..(1): Xaa can be any naturally occurring amino acid
XRRDWEGP

SEQ ID NO: 49 - protein, 9 aa, Artificial Sequence
  Synthetic construct
  misc_feature (8)..(8): Xaa can be any naturally occurring amino acid
VQGTHFPXT

SEQ ID NO: 50 - protein, 7 aa, Artificial Sequence
  Synthetic construct
  misc_feature (4)..(4): Xaa can be any naturally occurring amino acid
  misc_feature (6)..(6): Xaa can be any naturally occurring amino acid
WASXRXS

SEQ ID NO: 51 - protein, 9 aa, Artificial Sequence
  Synthetic construct
  misc_feature (4)..(5): Xaa can be any naturally occurring amino acid
QQYXXYPLT

SEQ ID NO: 52 - protein, 352 aa, Homo sapiens
MAEPRQEFEVMEDHAGTYGLGDRKDQGGYTMHQDQEGDTDAGLKAEEAGIGDTPSLEDEAAGHVTQARMVSKSKDGTGSDDKKAKGADGKTKIATPRGAAPPGQKGQANATRIPAKTPPAPKTPPSSGEPPKSGDRSGYSSPGSPGTPGSRSRTPSLPTPPTREPKKVAVVRTPPKSPSSAKSRLQTAPVPMPDLKNVKSKIGSTENLKHQPGGGKVQIVYKPVDLSKVTSKCGSLGNIHHKPGGGQVEVKSEKLDFKDRVQSKIGSLDNITHVPGGGNKKIETHKLTFRENAKAKTDHGAEIVYKSPVVSGDTSPRHLSNVSSTGSIDMVDSPQLATLADEVSASLAKQGL

SEQ ID NO: 53 - protein, 381 aa, Homo sapiens
MAEPRQEFEVMEDHAGTYGLGDRKDQGGYTMHQDQEGDTDAGLKESPLQTPTEDGSEEPGSETSDAKSTPTAEAEEAGIGDTPSLEDEAAGHVTQARMVSKSKDGTGSDDKKAKGADGKTKIATPRGAAPPGQKGQANATRIPAKTPPAPKTPPSSGEPPKSGDRSGYSSPGSPGTPGSRSRTPSLPTPPTREPKKVAVVRTPPKSPSSAKSRLQTAPVPMPDLKNVKSKIGSTENLKHQPGGGKVQIVYKPVDLSKVTSKCGSLGNIHHKPGGGQVEVKSEKLDFKDRVQSKIGSLDNITHVPGGGNKKIETHKLTFRENAKAKTDHGAEIVYKSPVVSGDTSPRHLSNVSSTGSIDMVDSPQLATLADEVSASLAKQGL

SEQ ID NO: 54 - protein, 410 aa, Homo sapiens
MAEPRQEFEVMEDHAGTYGLGDRKDQGGYTMHQDQEGDTDAGLKESPLQTPTEDGSEEPGSETSDAKSTPTAEDVTAPLVDEGAPGKQAAAQPHTEIPEGTTAEEAGIGDTPSLEDEAAGHVTQARMVSKSKDGTGSDDKKAKGADGKTKIATPRGAAPPGQKGQANATRIPAKTPPAPKTPPSSGEPPKSGDRSGYSSPGSPGTPGSRSRTPSLPTPPTREPKKVAVVRTPPKSPSSAKSRLQTAPVPMPDLKNVKSKIGSTENLKHQPGGGKVQIVYKPVDLSKVTSKCGSLGNIHHKPGGGQVEVKSEKLDFKDRVQSKIGSLDNITHVPGGGNKKIETHKLTFRENAKAKTDHGAEIVYKSPVVSGDTSPRHLSNVSSTGSIDMVDSPQLATLADEVSASLAKQGL

SEQ ID NO: 55 - protein, 383 aa, Homo sapiens
MAEPRQEFEVMEDHAGTYGLGDRKDQGGYTMHQDQEGDTDAGLKAEEAGIGDTPSLEDEAAGHVTQARMVSKSKDGTGSDDKKAKGADGKTKIATPRGAAPPGQKGQANATRIPAKTPPAPKTPPSSGEPPKSGDRSGYSSPGSPGTPGSRSRTPSLPTPPTREPKKVAVVRTPPKSPSSAKSRLQTAPVPMPDLKNVKSKIGSTENLKHQPGGGKVQIINKKLDLSNVQSKCGSKDNIKHVPGGGSVQIVYKPVDLSKVTSKCGSLGNIHHKPGGGQVEVKSEKLDFKDRVQSKIGSLDNITHVPGGGNKKIETHKLTFRENAKAKTDHGAEIVYKSPVVSGDTSPRHLSNVSSTGSIDMVDSPQLATLADEVSASLAKQGL

SEQ ID NO: 56 - protein, 412 aa, Homo sapiens
MAEPRQEFEVMEDHAGTYGLGDRKDQGGYTMHQDQEGDTDAGLKESPLQTPTEDGSEEPGSETSDAKSTPTAEAEEAGIGDTPSLEDEAAGHVTQARMVSKSKDGTGSDDKKAKGADGKTKIATPRGAAPPGQKGQANATRIPAKTPPAPKTPPSSGEPPKSGDRSGYSSPGSPGTPGSRSRTPSLPTPPTREPKKVAVVRTPPKSPSSAKSRLQTAPVPMPDLKNVKSKIGSTENLKHQPGGGKVQIINKKLDLSNVQSKCGSKDNIKHVPGGGSVQIVYKPVDLSKVTSKCGSLGNIHHKPGGGQVEVKSEKLDFKDRVQSKIGSLDNITHVPGGGNKKIETHKLTFRENAKAKTDHGAEIVYKSPVVSGDTSPRHLSNVSSTGSIDMVDSPQLATLADEVSASLAKQGL

SEQ ID NO: 57 - protein, 15 aa, Artificial Sequence
  Synthetic construct
SEEPGSETSDAKSTP

SEQ ID NO: 58 - protein, 15 aa, Artificial Sequence
  Synthetic construct
PTEDGSEEPGSETSD

SEQ ID NO: 59 - protein, 15 aa, Artificial Sequence
  Synthetic construct
SPLQTPTEDGSEEPG

SEQ ID NO: 60 - protein, 15 aa, Artificial Sequence
  Synthetic construct
AGLKESPLQTPTEDG

SEQ ID NO: 61 - protein, 15 aa, Artificial Sequence
  Synthetic construct
EGDTDAGLKESPLQT

SEQ ID NO: 62 - protein, 15 aa, Artificial Sequence
  Synthetic construct
MHQDQEGDTDAGLKE

SEQ ID NO: 63 - protein, 15 aa, Artificial Sequence
  Synthetic construct
QGGYTMHQDQEGDTD

SEQ ID NO: 64 - protein, 15 aa, Artificial Sequence
  Synthetic construct
GDRKDQGGYTMHQDQ

SEQ ID NO: 65 - protein, 15 aa, Artificial Sequence
  Synthetic construct
GTYGLGDRKDQGGYT

SEQ ID NO: 66 - protein, 15 aa, Artificial Sequence
  Synthetic construct
MEDHAGTYGLGDRKD

SEQ ID NO: 67 - protein, 15 aa, Artificial Sequence
  Synthetic construct
QEFEVMEDHAGTYGL

SEQ ID NO: 68 - protein, 15 aa, Artificial Sequence
  Synthetic construct
MAEPRQEFEVMEDHA

SEQ ID NO: 69 - protein, 15 aa, Artificial Sequence
  Synthetic construct
DEAAGHVTQARMVSK

SEQ ID NO: 70 - protein, 15 aa, Artificial Sequence
  Synthetic construct
TPSLEDEAAGHVTQA

SEQ ID NO: 71 - protein, 15 aa, Artificial Sequence
  Synthetic construct
AGIGDTPSLEDEAAG

SEQ ID NO: 72 - protein, 15 aa, Artificial Sequence
  Synthetic construct
TTAEEAGIGDTPSLE

SEQ ID NO: 73 - protein, 15 aa, Artificial Sequence
  Synthetic construct
EIPEGTTAEEAGIGD

SEQ ID NO: 74 - protein, 15 aa, Artificial Sequence
  Synthetic construct
AQPHTEIPEGTTAEE

SEQ ID NO: 75 - protein, 15 aa, Artificial Sequence
  Synthetic construct
GKQAAAQPHTEIPEG

SEQ ID NO: 76 - protein, 15 aa, Artificial Sequence
  Synthetic construct
DEGAPGKQAAAQPHT

SEQ ID NO: 77 - protein, 15 aa, Artificial Sequence
  Synthetic construct
TAPLVDEGAPGKQAA

SEQ ID NO: 78 - protein, 15 aa, Artificial Sequence
  Synthetic construct
TAEDVTAPLVDEGAP

SEQ ID NO: 79 - protein, 15 aa, Artificial Sequence
  Synthetic construct
AKSTPTAEDVTAPLV

SEQ ID NO: 80 - protein, 15 aa, Artificial Sequence
  Synthetic construct
SETSDAKSTPTAEDV

SEQ ID NO: 81 - protein, 15 aa, Artificial Sequence
  Synthetic construct
PPAPKTPPSSGEPPK

SEQ ID NO: 82 - protein, 15 aa, Artificial Sequence
  Synthetic construct
IPAKTPPAPKTPPSS

SEQ ID NO: 83 - protein, 15 aa, Artificial Sequence
  Synthetic construct
ANATRIPAKTPPAPK

SEQ ID NO: 84 - protein, 15 aa, Artificial Sequence
  Synthetic construct
GQKGQANATRIPAKT

SEQ ID NO: 85 - protein, 15 aa, Artificial Sequence
  Synthetic construct
GAAPPGQKGQANATR

SEQ ID NO: 86 - protein, 15 aa, Artificial Sequence
  Synthetic construct
IATPRGAAPPGQKGQ

SEQ ID NO: 87 - protein, 15 aa, Artificial Sequence
  Synthetic construct
DGKTKIATPRGAAPP

SEQ ID NO: 88 - protein, 15 aa, Artificial Sequence
  Synthetic construct
KAKGADGKTKIATPR

SEQ ID NO: 89 - protein, 15 aa, Artificial Sequence
  Synthetic construct
GSDDKKAKGADGKTK

SEQ ID NO: 90 - protein, 15 aa, Artificial Sequence
  Synthetic construct
SKDGTGSDDKKAKGA

SEQ ID NO: 91 - protein, 15 aa, Artificial Sequence
  Synthetic construct
RMVSKSKDGTGSDDK

SEQ ID NO: 92 - protein, 15 aa, Artificial Sequence
  Synthetic construct
HVTQARMVSKSKDGT

SEQ ID NO: 93 - protein, 15 aa, Artificial Sequence
  Synthetic construct
GGSGGGSDYKDDDDK

SEQ ID NO: 94 - protein, 15 aa, Artificial Sequence
  Synthetic construct
TPPKSPSSAKSRLQT

SEQ ID NO: 95 - protein, 15 aa, Artificial Sequence
  Synthetic construct
VAVVRTPPKSPSSAK

SEQ ID NO: 96 - protein, 15 aa, Artificial Sequence
  Synthetic construct
REPKKVAVVRTPPKS

SEQ ID NO: 97 - protein, 15 aa, Artificial Sequence
  Synthetic construct
PTPPTREPKKVAVVR

SEQ ID NO: 98 - protein, 15 aa, Artificial Sequence
  Synthetic construct
RTPSLPTPPTREPKK

SEQ ID NO: 99 - protein, 15 aa, Artificial Sequence
  Synthetic construct
PGSRSRTPSLPTPPT

SEQ ID NO: 100 - protein, 15 aa, Artificial Sequence
  Synthetic construct
GSPGTPGSRSRTPSL

SEQ ID NO: 101 - protein, 15 aa, Artificial Sequence
  Synthetic construct
GYSSPGSPGTPGSRS

SEQ ID NO: 102 - protein, 15 aa, Artificial Sequence
  Synthetic construct
SGDRSGYSSPGSPGT

SEQ ID NO: 103 - protein, 15 aa, Artificial Sequence
  Synthetic construct
GEPPKSGDRSGYSSP

SEQ ID NO: 104 - protein, 15 aa, Artificial Sequence
  Synthetic construct
TPPSSGEPPKSGDRS

SEQ ID NO: 105 - protein, 15 aa, Artificial Sequence
  Synthetic construct
CGSKDNIKHVPGGGS

SEQ ID NO: 106 - protein, 15 aa, Artificial Sequence
  Synthetic construct
NVQSKCGSKDNIKHV

SEQ ID NO: 107 - protein, 15 aa, Artificial Sequence
  Synthetic construct
KLDLSNVQSKCGSKD

SEQ ID NO: 108 - protein, 15 aa, Artificial Sequence
  Synthetic construct
QIINKKLDLSNVQSK

SEQ ID NO: 109 - protein, 15 aa, Artificial Sequence
  Synthetic construct
GGGKVQIINKKLDLS

SEQ ID NO: 110 - protein, 15 aa, Artificial Sequence
  Synthetic construct
LKHQPGGGKVQIINK

SEQ ID NO: 111 - protein, 15 aa, Artificial Sequence
  Synthetic construct
GSTENLKHQPGGGKV

SEQ ID NO: 112 - protein, 15 aa, Artificial Sequence
  Synthetic construct
VKSKIGSTENLKHQP

SEQ ID NO: 113 - protein, 15 aa, Artificial Sequence
  Synthetic construct
PDLKNVKSKIGSTEN

SEQ ID NO: 114 - protein, 15 aa, Artificial Sequence
  Synthetic construct
APVPMPDLKNVKSKI

SEQ ID NO: 115 - protein, 15 aa, Artificial Sequence
  Synthetic construct
SRLQTAPVPMPDLKN

SEQ ID NO: 116 - protein, 15 aa, Artificial Sequence
  Synthetic construct
PSSAKSRLQTAPVPM

SEQ ID NO: 117 - protein, 15 aa, Artificial Sequence
  Synthetic construct
FKDRVQSKIGSLDNI

SEQ ID NO: 118 - protein, 15 aa, Artificial Sequence
  Synthetic construct
SEKLDFKDRVQSKIG

SEQ ID NO: 119 - protein, 15 aa, Artificial Sequence
  Synthetic construct
QVEVKSEKLDFKDRV

SEQ ID NO: 120 - protein, 15 aa, Artificial Sequence
  Synthetic construct
KPGGGQVEVKSEKLD

SEQ ID NO: 121 - protein, 15 aa, Artificial Sequence
  Synthetic construct
GNIHHKPGGGQVEVK

SEQ ID NO: 122 - protein, 15 aa, Artificial Sequence
  Synthetic construct
KCGSLGNIHHKPGGG

SEQ ID NO: 123 - protein, 15 aa, Artificial Sequence
  Synthetic construct
SKVTSKCGSLGNIHH

SEQ ID NO: 124 - protein, 15 aa, Artificial Sequence
  Synthetic construct
KPVDLSKVTSKCGSL

SEQ ID NO: 125 - protein, 15 aa, Artificial Sequence
  Synthetic construct
VQIVYKPVDLSKVTS

SEQ ID NO: 126 - protein, 15 aa, Artificial Sequence
  Synthetic construct
PGGGSVQIVYKPVDL

SEQ ID NO: 127 - protein, 15 aa, Artificial Sequence
  Synthetic construct
NIKHVPGGGSVQIVY

SEQ ID NO: 128 - protein, 15 aa, Artificial Sequence
  Synthetic construct
RHLSNVSSTGSIDMV

SEQ ID NO: 129 - protein, 15 aa, Artificial Sequence
  Synthetic construct
GDTSPRHLSNVSSTG

SEQ ID NO: 130 - protein, 15 aa, Artificial Sequence
  Synthetic construct
SPVVSGDTSPRHLSN

SEQ ID NO: 131 - protein, 15 aa, Artificial Sequence
  Synthetic construct
EIVYKSPVVSGDTSP

SEQ ID NO: 132 - protein, 15 aa, Artificial Sequence
  Synthetic construct
TDHGAEIVYKSPVVS

SEQ ID NO: 133 - protein, 15 aa, Artificial Sequence
  Synthetic construct
NAKAKTDHGAEIVYK

SEQ ID NO: 134 - protein, 15 aa, Artificial Sequence
  Synthetic construct
LTFRENAKAKTDHGA

SEQ ID NO: 135 - protein, 15 aa, Artificial Sequence
  Synthetic construct
IETHKLTFRENAKAK

SEQ ID NO: 136 - protein, 15 aa, Artificial Sequence
  Synthetic construct
GGNKKIETHKLTFRE

SEQ ID NO: 137 - protein, 15 aa, Artificial Sequence
  Synthetic construct
THVPGGGNKKIETHK

SEQ ID NO: 138 - protein, 15 aa, Artificial Sequence
  Synthetic construct
SLDNITHVPGGGNKK

SEQ ID NO: 139 - protein, 15 aa, Artificial Sequence
  Synthetic construct
QSKIGSLDNITHVPG

SEQ ID NO: 140 - protein, 15 aa, Artificial Sequence
  Synthetic construct
TLADEVSASLAKQGL

SEQ ID NO: 141 - protein, 15 aa, Artificial Sequence
  Synthetic construct
ATLADEVSASLAKQG

SEQ ID NO: 142 - protein, 15 aa, Artificial Sequence
  Synthetic construct
DSPQLATLADEVSAS

SEQ ID NO: 143 - protein, 15 aa, Artificial Sequence
  Synthetic construct
SIDMVDSPQLATLAD

SEQ ID NO: 144 - protein, 15 aa, Artificial Sequence
  Synthetic construct
VSSTGSIDMVDSPQL

SEQ ID NO: 145 - protein, 113 aa, Artificial Sequence
  Synthetic construct
EVQLLESGGGLVQPGGSLRLSCAASGFTFSSYGMSWVRQAPGKGLEWVSSISGDGGSYIHYADSVKGRFTISRDNSKNTLYLQMNSLRAEDTAVYYCARLPYWGQGTLVTVSS

SEQ ID NO: 146 - protein, 113 aa, Artificial Sequence
  Synthetic construct
EVQLLESGGGLVQPGGSLRLSCAASGFTFSSYGMSWVRQAPGKGLEWVASISGDGGSYIHYADSVKGRFTISRDNSKNTLYLQMNSLRAEDTAVYYCARLPYWGQGTLVTVSS

SEQ ID NO: 147 - protein, 113 aa, Artificial Sequence
  Synthetic construct
EVQLLESGGGLVQPGGSLRLSCAASGFTFSSYGMSWVRQAPGKGLEWVSSISGDGGSYIHYADSVKGRFTISRDNAKNTLYLQMNSLRAEDTAVYYCARLPYWGQGTLVTVSS

SEQ ID NO: 148 - protein, 113 aa, Artificial Sequence
  Synthetic construct
EVQLLESGGGLVQPGGSLRLSCAASGFTFSSYGMSWVRQAPGKGLEWVASISGDGGSYIHYADSVKGRFTISRDNAKNTLYLQMNSLRAEDTAVYYCARLPYWGQGTLVTVSS

SEQ ID NO: 149 - protein, 114 aa, Artificial Sequence
  Synthetic construct
DIVMTQSPDSLAVSLGERATINCKSSQSLLNSGNQKNYLTWYQQKPGQPPKLLIYWASTRESGVPDRFSGSGSGTDFTLTISSLQAEDVAVYYCQQYNSYPLTFGQGTKVEIKR

SEQ ID NO: 150 - protein, 10 aa, Artificial Sequence
  Synthetic construct
GFKFSRVGVS

SEQ ID NO: 151 - protein, 10 aa, Artificial Sequence
  Synthetic construct
GFTFSRVGTS

SEQ ID NO: 152 - protein, 10 aa, Artificial Sequence
  Synthetic construct
GFRFSRVGMS

SEQ ID NO: 153 - protein, 10 aa, Artificial Sequence
  Synthetic construct
GFRFSGPGMS

SEQ ID NO: 154 - protein, 10 aa, Artificial Sequence
  Synthetic construct
VIKWRIYGMS

SEQ ID NO: 155 - protein, 5 aa, Artificial Sequence
  Synthetic construct
AKLPF

SEQ ID NO: 156 - protein, 17 aa, Artificial Sequence
  Synthetic construct
KSSHSLYSSRRHKHYLA

SEQ ID NO: 157 - protein, 17 aa, Artificial Sequence
  Synthetic construct
KSSQSLLRSGKRQNYLV

SEQ ID NO: 158 - protein, 17 aa, Artificial Sequence
  Synthetic construct
KSSQSLHRSGTQKDYLV

SEQ ID NO: 159 - protein, 9 aa, Artificial Sequence
  Synthetic construct
QKYNSYPLT

SEQ ID NO: 160 - protein, 9 aa, Artificial Sequence
  Synthetic construct
QKYDSYPLT

SEQ ID NO: 161 - protein, 9 aa, Artificial Sequence
  Synthetic construct
QHYRTYPLT

SEQ ID NO: 162 - protein, 9 aa, Artificial Sequence
  Synthetic construct
QHYRSYPMT

SEQ ID NO: 163 - protein, 10 aa, Artificial Sequence
  Synthetic construct
  MISC_FEATURE (1)..(1): Xaa = Gly or Val
  MISC_FEATURE (2)..(2): Xaa = Phe or Ile
  MISC_FEATURE (3)..(3): Xaa = Thr, Lys, or Arg
  MISC_FEATURE (4)..(4): Xaa = Thr, Lys, or Arg
  MISC_FEATURE (5)..(5): Xaa = Ser or Arg
  MISC_FEATURE (6)..(6): Xaa = Ser, Arg, Gly, or Ile
  MISC_FEATURE (7)..(7): Xaa = Tyr, Val, or Pro
  MISC_FEATURE (9)..(9): Xaa = Met, Val, or Thr
XXXXXXXGXS

SEQ ID NO: 164 - protein, 5 aa, Artificial Sequence
  Synthetic construct
  MISC_FEATURE (2)..(2): Xaa = Arg or Lys
  MISC_FEATURE (5)..(5): Xaa = Tyr or Phe
AXLPX

SEQ ID NO: 165 - protein, 17 aa, Artificial Sequence
  Synthetic construct
  MISC_FEATURE (4)..(4): Xaa = Gln or His
  MISC_FEATURE (7)..(7): Xaa = Leu, Tyr, or His
  MISC_FEATURE (8)..(8): Xaa = Asn, Ser, or Arg
  MISC_FEATURE (10)..(10): Xaa = Gly or Arg
  MISC_FEATURE (11)..(11): Xaa = Asn, Arg, Lys, or Thr
  MISC_FEATURE (12)..(12): Xaa = Gln, His, or Arg
  MISC_FEATURE (13)..(13): Xaa = Lys or Gln
  MISC_FEATURE (14)..(14): Xaa = Asn, His, or Asp
  MISC_FEATURE (17)..(17): Xaa = Asn, Thr, Val
KSSXSLXXSXXXXXYLX

SEQ ID NO: 166 - protein, 9 aa, Artificial Sequence
  Synthetic construct
  MISC_FEATURE (2)..(2): Xaa = Gln, Lys, or His
  MISC_FEATURE (4)..(4): Xaa = Asn, Asp, or Arg
  MISC_FEATURE (5)..(5): Xaa = Ser or Thr
  MISC_FEATURE (8)..(8): Xaa = Leu or Met
QXYXXYPXT

SEQ ID NO: 167 - protein, 114 aa, Artificial Sequence
  Synthetic construct
QVQLQQPGAELVGPGSSVKLSCKASGYTFINYWIDWMKQSPGQGLEWIGNIYPSDSESHYNQKFTDKATLTVDISSSTAYLQLSSLTSEDSAVYYCALYSKGYWGQGTSVTVSS

SEQ ID NO: 168 - protein, 10 aa, Artificial Sequence
  Synthetic construct
GYTFINYWID

SEQ ID NO: 169 - protein, 17 aa, Artificial Sequence
  Synthetic construct
NIYPSDSESHYNQKFTD

SEQ ID NO: 170 - protein, 7 aa, Artificial Sequence
  Synthetic construct
ALYSKGY

SEQ ID NO: 171 - protein, 113 aa, Artificial Sequence
  Synthetic construct
DVLMTQTPLSLPVTLGDQASISCRSSQNIVHTNGNTYLEWYLQKPGQSPKLLIYKLSSRFSGVPDRFSGSGSGTDFTLKISRVEAEDLGVYYCFQGSHLPFTFGGGTKLEIKR

SEQ ID NO: 172 - protein, 16 aa, Artificial Sequence
  Synthetic construct
RSSQNIVHTNGNTYLE

SEQ ID NO: 173 - protein, 7 aa, Artificial Sequence
  Synthetic construct
KLSSRFS

SEQ ID NO: 174 - protein, 9 aa, Artificial Sequence
  Synthetic construct
FQGSHLPFT

SEQ ID NO: 175 - protein, 10 aa, Artificial Sequence
  Synthetic construct
  misc_feature (2)..(2): Xaa can be any naturally occurring amino acid
  misc_feature (7)..(8): Xaa can be any naturally occurring amino acid
GXTFINXXID

SEQ ID NO: 176 - protein, 16 aa, Artificial Sequence
  Synthetic construct
  misc_feature (1)..(1): Xaa can be any naturally occurring amino acid
  misc_feature (4)..(4): Xaa can be any naturally occurring amino acid
  misc_feature (10)..(10): Xaa can be any naturally occurring amino acid
XSSXNIVHTXGNTYLE

SEQ ID NO: 177 - protein, 9 aa, Artificial Sequence
  Synthetic construct
  misc_feature (2)..(2): Xaa can be any naturally occurring amino acid
  misc_feature (8)..(8): Xaa can be any naturally occurring amino acid
FXGSHLPXT

SEQ ID NO: 178 - protein, 20 aa, Artificial Sequence
  Synthetic construct
GEPPKSGDRSGYSSPGSPGT

SEQ ID NO: 179 - protein, 15 aa, Artificial Sequence
  Synthetic construct
GEPPKSGDRSGYSSP

SEQ ID NO: 180 - protein, 15 aa, Artificial Sequence
  Synthetic construct
SGDRSGYSSPGSPGT

SEQ ID NO: 181 - protein, 217 aa, Artificial Sequence
  Synthetic construct
APELLGGPSVFLFPPKPKDTLMISRTPEVTCVVVDVSHEDPEVKFNWYVDGVEVHNAKTKPREEQYNSTYRVVSVLTVLHQDWLNGKEYKCKVSNKALPAPIEKTISKAKGQPREPQVYTLPPSRDELTKNQVSLTCLVKGFYPSDIAVEWESNGQPENNYKTTPPVLDSDGSFFLYSKLTVDKSRWQQGNVFSCSVMHEALHNHYTQKSLSLSPGK

SEQ ID NO: 182 - protein, 110 aa, Artificial Sequence
  Synthetic construct
APELLGGPSVFLFPPKPKDTLMISRTPEVTCVVVDVSHEDPEVKFNWYVDGVEVHNAKTKPREEQYNSTYRVVSVLTVLHQDWLNGKEYKCKVSNKALPAPIEKTISKAK

SEQ ID NO: 183 - protein, 107 aa, Artificial Sequence
  Synthetic construct
GQPREPQVYTLPPSRDELTKNQVSLTCLVKGFYPSDIAVEWESNGQPENNYKTTPPVLDSDGSFFLYSKLTVDKSRWQQGNVFSCSVMHEALHNHYTQKSLSLSPGK

SEQ ID NO: 184 - protein, 217 aa, Artificial Sequence
  Synthetic construct
APELLGGPSVFLFPPKPKDTLMISRTPEVTCVVVDVSHEDPEVKFNWYVDGVEVHNAKTKPREEQYNSTYRVVSVLTVLHQDWLNGKEYKCKVSNKALPAPIEKTISKAKGQPREPQVYTLPPSRDELTKNQVSLTCLVKGFYPSDIAVEWESLGLVWVGYKTTPPVLDSDGSFFLYSKLTVAKSTWQQGWVFSCSVMHEALHNHYTQKSLSLSPGK

SEQ ID NO: 185 - protein, 217 aa, Artificial Sequence
  Synthetic construct
APELLGGPSVFLFPPKPKDTLMISRTPEVTCVVVDVSHEDPEVKFNWYVDGVEVHNAKTKPREEQYNSTYRVVSVLTVLHQDWLNGKEYKCKVSNKALPAPIEKTISKAKGQPREPQVYTLPPSRDELTKNQVSLTCLVKGFYPSDIAVEWESYGTVWSHYKTTPPVLDSDGSFFLYSKLTVSKSEWQQGYVFSCSVMHEALHNHYTQKSLSLSPGK

SEQ ID NO: 186 - protein, 217 aa, Artificial Sequence
  Synthetic construct
APELLGGPSVFLFPPKPKDTLMISRTPEVTCVVVDVSHEDPEVKFNWYVDGVEVHNAKTKPREEQYNSTYRVVSVLTVLHQDWLNGKEYKCKVSNKALPAPIEKTISKAKGQPREPQVYTLPPSRDELTKNQVSLTCLVKGFYPSDIAVEWESYGTEWSQYKTTPPVLDSDGSFFLYSKLTVEKSDWQQGHVFSCSVMHEALHNHYTQKSLSLSPGK

SEQ ID NO: 187 - protein, 217 aa, Artificial Sequence
  Synthetic construct
APELLGGPSVFLFPPKPKDTLMISRTPEVTCVVVDVSHEDPEVKFNWYVDGVEVHNAKTKPREEQYNSTYRVVSVLTVLHQDWLNGKEYKCKVSNKALPAPIEKTISKAKGQPREPQVYTLPPSRDELTKNQVSLTCLVKGFYPSDIAVEWESVGTPWALYKTTPPVLDSDGSFFLYSKLTVLKSEWQQGWVFSCSVMHEALHNHYTQKSLSLSPGK

SEQ ID NO: 188 - protein, 217 aa, Artificial Sequence
  Synthetic construct
APELLGGPSVFLFPPKPKDTLMISRTPEVTCVVVDVSHEDPEVKFNWYVDGVEVHNAKTKPREEQYNSTYRVVSVLTVLHQDWLNGKEYKCKVSNKALPAPIEKTISKAKGQPREPQVYTLPPSRDELTKNQVSLTCLVKGFYPSDIAVEWESYGTVWSKYKTTPPVLDSDGSFFLYSKLTVSKSEWQQGFVFSCSVMHEALHNHYTQKSLSLSPGK

SEQ ID NO: 189 - protein, 217 aa, Artificial Sequence
  Synthetic construct
APELLGGPSVFLFPPKPKDTLMISRTPEVTCVVVDVSHEDPEVKFNWYVDGVEVHNAKTKPREEQYNSTYRVVSVLTVLHQDWLNGKEYKCKVSNKALPAPIEKTISKAKGQPREPQVYTLPPSRDELTKNQVSLTCLVKGFYPSDIAVEWESLGHVWAVYKTTPPVLDSDGSFFLYSKLTVPKSTWQQGWVFSCSVMHEALHNHYTQKSLSLSPGK

SEQ ID NO: 190 - protein, 217 aa, Artificial Sequence
  Synthetic construct
APELLGGPSVFLFPPKPKDTLMISRTPEVTCVVVDVSHEDPEVKFNWYVDGVEVHNAKTKPREEQYNSTYRVVSVLTVLHQDWLNGKEYKCKVSNKALPAPIEKTISKAKGQPREPQVYTLPPSRDELTKNQVSLTCLVKGFYPSDIAVEWESLGLVWVGYKTTPPVLDSDGSFFLYSKLTVPKSTWQQGWVFSCSVMHEALHNHYTQKSLSLSPGK

SEQ ID NO: 191 - protein, 217 aa, Artificial Sequence
  Synthetic construct
APELLGGPSVFLFPPKPKDTLMISRTPEVTCVVVDVSHEDPEVKFNWYVDGVEVHNAKTKPREEQYNSTYRVVSVLTVLHQDWLNGKEYKCKVSNKALPAPIEKTISKAKGQPREPQVYTLPPSRDELTKNQVSLTCLVKGFYPSDIAVEWESMGHVWVGYKTTPPVLDSDGSFFLYSKLTVDKSTWQQGWVFSCSVMHEALHNHYTQKSLSLSPGK

SEQ ID NO: 192 - protein, 217 aa, Artificial Sequence
  Synthetic construct
APELLGGPSVFLFPPKPKDTLMISRTPEVTCVVVDVSHEDPEVKFNWYVDGVEVHNAKTKPREEQYNSTYRVVSVLTVLHQDWLNGKEYKCKVSNKALPAPIEKTISKAKGQPREPQVYTLPPSRDELTKNQVSLTCLVKGFYPSDIAVEWESLGLVWVFSKTTPPVLDSDGSFFLYSKLTVPKSTWQQGWVFSCSVMHEALHNHYTQKSLSLSPGK

SEQ ID NO: 193 - protein, 217 aa, Artificial Sequence
  Synthetic construct
APELLGGPSVFLFPPKPKDTLMISRTPEVTCVVVDVSHEDPEVKFNWYVDGVEVHNAKTKPREEQYNSTYRVVSVLTVLHQDWLNGKEYKCKVSNKALPAPIEKTISKAKGQPREPQVYTLPPSRDELTKNQVSLTCLVKGFYPSDIAVEWESYGTEWSSYKTTPPVLDSDGSFFLYSKLTVTKSEWQQGFVFSCSVMHEALHNHYTQKSLSLSPGK

SEQ ID NO: 194 - protein, 217 aa, Artificial Sequence
  Synthetic construct
APELLGGPSVFLFPPKPKDTLMISRTPEVTCVVVDVSHEDPEVKFNWYVDGVEVHNAKTKPREEQYNSTYRVVSVLTVLHQDWLNGKEYKCKVSNKALPAPIEKTISKAKGQPREPQVYTLPPSRDELTKNQVSLTCLVKGFYPSDIAVEWESYGTEWSNYKTTPPVLDSDGSFFLYSKLTVSKSEWQQGFVFSCSVMHEALHNHYTQKSLSLSPGK

SEQ ID NO: 195 - protein, 217 aa, Artificial Sequence
  Synthetic construct
APELLGGPSVFLFPPKPKDTLMISRTPEVTCVVVDVSHEDPEVKFNWYVDGVEVHNAKTKPREEQYNSTYRVVSVLTVLHQDWLNGKEYKCKVSNKALPAPIEKTISKAKGQPREPQVYTLPPSRDELTKNQVSLTCLVKGFYPSDIAVEWESLGHVWVGYKTTPPVLDSDGSFFLYSKLTVSKSEWQQGWVFSCSVMHEALHNHYTQKSLSLSPGK

SEQ ID NO: 196 - protein, 217 aa, Artificial Sequence
  Synthetic construct
APELLGGPSVFLFPPKPKDTLMISRTPEVTCVVVDVSHEDPEVKFNWYVDGVEVHNAKTKPREEQYNSTYRVVSVLTVLHQDWLNGKEYKCKVSNKALPAPIEKTISKAKGQPREPQVYTLPPSRDELTKNQVSLTCLVKGFYPSDIAVEWESLGHVWVATKTTPPVLDSDGSFFLYSKLTVPKSTWQQGWVFSCSVMHEALHNHYTQKSLSLSPGK

SEQ ID NO: 197 - protein, 217 aa, Artificial Sequence
  Synthetic construct
APELLGGPSVFLFPPKPKDTLMISRTPEVTCVVVDVSHEDPEVKFNWYVDGVEVHNAKTKPREEQYNSTYRVVSVLTVLHQDWLNGKEYKCKVSNKALPAPIEKTISKAKGQPREPQVYTLPPSRDELTKNQVSLTCLVKGFYPSDIAVEWESLGPVWVHTKTTPPVLDSDGSFFLYSKLTVPKSTWQQGWVFSCSVMHEALHNHYTQKSLSLSPGK

SEQ ID NO: 198 - protein, 217 aa, Artificial Sequence
  Synthetic construct
APELLGGPSVFLFPPKPKDTLMISRTPEVTCVVVDVSHEDPEVKFNWYVDGVEVHNAKTKPREEQYNSTYRVVSVLTVLHQDWLNGKEYKCKVSNKALPAPIEKTISKAKGQPREPQVYTLPPSRDELTKNQVSLTCLVKGFYPSDIAVEWESLGHVWVDQKTTPPVLDSDGSFFLYSKLTVPKSTWQQGWVFSCSVMHEALHNHYTQKSLSLSPGK

SEQ ID NO: 199 - protein, 217 aa, Artificial Sequence
  Synthetic construct
APELLGGPSVFLFPPKPKDTLMISRTPEVTCVVVDVSHEDPEVKFNWYVDGVEVHNAKTKPREEQYNSTYRVVSVLTVLHQDWLNGKEYKCKVSNKALPAPIEKTISKAKGQPREPQVYTLPPSRDELTKNQVSLTCLVKGFYPSDIAVEWESLGHVWVNQKTTPPVLDSDGSFFLYSKLTVPKSTWQQGWVFSCSVMHEALHNHYTQKSLSLSPGK

SEQ ID NO: 200 - protein, 217 aa, Artificial Sequence
  Synthetic construct
APELLGGPSVFLFPPKPKDTLMISRTPEVTCVVVDVSHEDPEVKFNWYVDGVEVHNAKTKPREEQYNSTYRVVSVLTVLHQDWLNGKEYKCKVSNKALPAPIEKTISKAKGQPREPQVYTLPPSRDELTKNQVSLTCLVKGFYPSDIAVEWESLGHVWVNFKTTPPVLDSDGSFFLYSKLTVPKSTWQQGWVFSCSVMHEALHNHYTQKSLSLSPGK

SEQ ID NO: 201 - protein, 217 aa, Artificial Sequence
  Synthetic construct
APELLGGPSVFLFPPKPKDTLMISRTPEVTCVVVDVSHEDPEVKFNWYVDGVEVHNAKTKPREEQYNSTYRVVSVLTVLHQDWLNGKEYKCKVSNKALPAPIEKTISKAKGQPREPQVYTLPPSRDELTKNQVSLTCLVKGFYPSDIAVWWESLGHVWAVYKTTPPVLDSDGSFFLYSKLTVPKSTWQQGWVFSCSVMHEALHNHYTQKSLSLSPGK

SEQ ID NO: 202 - protein, 217 aa, Artificial Sequence
  Synthetic construct
APELLGGPSVFLFPPKPKDTLMISRTPEVTCVVVDVSHEDPEVKFNWYVDGVEVHNAKTKPREEQYNSTYRVVSVLTVLHQDWLNGKEYKCKVSNKALPAPIEKTISKAKGQPREPQVYTLPPSRDELTKNQVSLTCLVKGFYPSDIAVLWESLGHVWAVYKTTPPVLDSDGSFFLYSKLTVPKSTWQQGWVFSCSVMHEALHNHYTQKSLSLSPGK

SEQ ID NO: 203 - protein, 217 aa, Artificial Sequence
  Synthetic construct
APELLGGPSVFLFPPKPKDTLMISRTPEVTCVVVDVSHEDPEVKFNWYVDGVEVHNAKTKPREEQYNSTYRVVSVLTVLHQDWLNGKEYKCKVSNKALPAPIEKTISKAKGQPREPQVYTLPPSRDELTKNQVSLTCLVKGFYPSDIAVYWESLGHVWAVYKTTPPVLDSDGSFFLYSKLTVPKSTWQQGWVFSCSVMHEALHNHYTQKSLSLSPGK

SEQ ID NO: 204 - protein, 217 aa, Artificial Sequence
  Synthetic construct
APELLGGPSVFLFPPKPKDTLMISRTPEVTCVVVDVSHEDPEVKFNWYVDGVEVHNAKTKPREEQYNSTYRVVSVLTVLHQDWLNGKEYKCKVSNKALPAPIEKTISKAKGQPREPQVYTLPPSRDELTKNQVSLTCLVKGFYPSDIAVEWESLGHVWAVYQTTPPVLDSDGSFFLYSKLTVPKSTWQQGWVFSCSVMHEALHNHYTQKSLSLSPGK

SEQ ID NO: 205 - protein, 217 aa, Artificial Sequence
  Synthetic construct
APELLGGPSVFLFPPKPKDTLMISRTPEVTCVVVDVSHEDPEVKFNWYVDGVEVHNAKTKPREEQYNSTYRVVSVLTVLHQDWLNGKEYKCKVSNKALPAPIEKTISKAKGQPREPQVYTLPPSRDELTKNQVSLTCLVKGFYPSDIAVEWESLGHVWAVYFTTPPVLDSDGSFFLYSKLTVPKSTWQQGWVFSCSVMHEALHNHYTQKSLSLSPGK

SEQ ID NO: 206 - protein, 217 aa, Artificial Sequence
  Synthetic construct
APELLGGPSVFLFPPKPKDTLMISRTPEVTCVVVDVSHEDPEVKFNWYVDGVEVHNAKTKPREEQYNSTYRVVSVLTVLHQDWLNGKEYKCKVSNKALPAPIEKTISKAKGQPREPQVYTLPPSRDELTKNQVSLTCLVKGFYPSDIAVEWESLGHVWAVYHTTPPVLDSDGSFFLYSKLTVPKSTWQQGWVFSCSVMHEALHNHYTQKSLSLSPGK

SEQ ID NO: 207 - protein, 217 aa, Artificial Sequence; identical to SEQ ID NO: 201
  Synthetic construct

SEQ ID NO: 208 - protein, 217 aa, Artificial Sequence; identical to SEQ ID NO: 204
  Synthetic construct

SEQ ID NO: 209 - protein, 217 aa, Artificial Sequence
  Synthetic construct
APELLGGPSVFLFPPKPKDTLMISRTPEVTCVVVDVSHEDPEVKFNWYVDGVEVHNAKTKPREEQYNSTYRVVSVLTVLHQDWLNGKEYKCKVSNKALPAPIEKTISKAKGQPREPQVYTLPPSRDELTKNQVSLTCLVKGFYPSDIAVWWESLGHVWAVYQTTPPVLDSDGSFFLYSKLTVPKSTWQQGWVFSCSVMHEALHNHYTQKSLSLSPGK

SEQ ID NO: 210 - protein, 217 aa, Artificial Sequence
  Synthetic construct
APELLGGPSVFLFPPKPKDTLMISRTPEVTCVVVDVSHEDPEVKFNWYVDGVEVHNAKTKPREEQYNSTYRVVSVLTVLHQDWLNGKEYKCKVSNKALPAPIEKTISKAKGQPREPQVYTLPPSRDELTKNQVSLTCLVKGFYPSDIAVWWESLGHVWVNQKTTPPVLDSDGSFFLYSKLTVPKSTWQQGWVFSCSVMHEALHNHYTQKSLSLSPGK

SEQ ID NO: 211 - protein, 217 aa, Artificial Sequence
  Synthetic construct
APELLGGPSVFLFPPKPKDTLMISRTPEVTCVVVDVSHEDPEVKFNWYVDGVEVHNAKTKPREEQYNSTYRVVSVLTVLHQDWLNGKEYKCKVSNKALPAPIEKTISKAKGQPREPQVYTLPPSRDELTKNQVSLTCLVKGFYPSDIAVEWESLGHVWVNQQTTPPVLDSDGSFFLYSKLTVPKSTWQQGWVFSCSVMHEALHNHYTQKSLSLSPGK

SEQ ID NO: 212 - protein, 217 aa, Artificial Sequence
  Synthetic construct
APELLGGPSVFLFPPKPKDTLMISRTPEVTCVVVDVSHEDPEVKFNWYVDGVEVHNAKTKPREEQYNSTYRVVSVLTVLHQDWLNGKEYKCKVSNKALPAPIEKTISKAKGQPREPQVYTLPPSRDELTKNQVSLTCLVKGFYPSDIAVWWESLGHVWVNQQTTPPVLDSDGSFFLYSKLTVPKSTWQQGWVFSCSVMHEALHNHYTQKSLSLSPGK

SEQ ID NO: 213 - protein, 217 aa, Artificial Sequence
  Synthetic construct
APELLGGPSVFLFPPKPKDTLMISRTPEVTCVVVDVSHEDPEVKFNWYVDGVEVHNAKTKPREEQYNSTYRVVSVLTVLHQDWLNGKEYKCKVSNKALPAPIEKTISKAKGQPREPQVYTLPPSRDELTKNQVSLTCLVKGFYPSDIAVWWESYGTEWSSYKTTPPVLDSDGSFFLYSKLTVTKSEWQQGFVFSCSVMHEALHNHYTQKSLSLSPGK

SEQ ID NO: 214 - protein, 217 aa, Artificial Sequence
  Synthetic construct
APELLGGPSVFLFPPKPKDTLMISRTPEVTCVVVDVSHEDPEVKFNWYVDGVEVHNAKTKPREEQYNSTYRVVSVLTVLHQDWLNGKEYKCKVSNKALPAPIEKTISKAKGQPREPQVYTLPPSRDELTKNQVSLTCLVKGFYPSDIAVEWESYGTEWSSYKTTPPVLDSDGSFFLYSKLTVTKEEWQQGFVFSCSVMHEALHNHYTQKSLSLSPGK

SEQ ID NO: 215 - protein, 217 aa, Artificial Sequence
  Synthetic construct
APELLGGPSVFLFPPKPKDTLMISRTPEVTCVVVDVSHEDPEVKFNWYVDGVEVHNAKTKPREEQYNSTYRVVSVLTVLHQDWLNGKEYKCKVSNKALPAPIEKTISKAKGQPREPQVYTLPPSRDELTKNQVSLTCLVKGFYPSDIAVWWESYGTEWSSYKTTPPVLDSDGSFFLYSKLTVTKEEWQQGFVFSCSVMHEALHNHYTQKSLSLSPGK

SEQ ID NO: 216 - protein, 217 aa, Artificial Sequence
  Synthetic construct
APELLGGPSVFLFPPKPKDTLMISRTPEVTCVVVDVSHEDPEVKFNWYVDGVEVHNAKTKPREEQYNSTYRVVSVLTVLHQDWLNGKEYKCKVSNKALPAPIEKTISKAKGQPREPQVYTLPPSRDELTKNQVSLTCLVKGFYPSDIAVWWESYGTEWSNYKTTPPVLDSDGSFFLYSKLTVTKSEWQQGFVFSCSVMHEALHNHYTQKSLSLSPGK

SEQ ID NO: 217 - protein, 217 aa, Artificial Sequence
  Synthetic construct
APELLGGPSVFLFPPKPKDTLMISRTPEVTCVVVDVSHEDPEVKFNWYVDGVEVHNAKTKPREEQYNSTYRVVSVLTVLHQDWLNGKEYKCKVSNKALPAPIEKTISKAKGQPREPQVYTLPPSRDELTKNQVSLTCLVKGFYPSDIAVEWESYGTEWSNYKTTPPVLDSDGSFFLYSKLTVTKEEWQQGFVFSCSVMHEALHNHYTQKSLSLSPGK

SEQ ID NO: 218 - protein, 217 aa, Artificial Sequence
  Synthetic construct
APELLGGPSVFLFPPKPKDTLMISRTPEVTCVVVDVSHEDPEVKFNWYVDGVEVHNAKTKPREEQYNSTYRVVSVLTVLHQDWLNGKEYKCKVSNKALPAPIEKTISKAKGQPREPQVYTLPPSRDELTKNQVSLTCLVKGFYPSDIAVWWESYGTEWSNYKTTPPVLDSDGSFFLYSKLTVTKEEWQQGFVFSCSVMHEALHNHYTQKSLSLSPGK

SEQ ID NO: 219 - protein, 217 aa, Artificial Sequence
  Synthetic construct
APELLGGPSVFLFPPKPKDTLMISRTPEVTCVVVDVSHEDPEVKFNWYVDGVEVHNAKTKPREEQYNSTYRVVSVLTVLHQDWLNGKEYKCKVSNKALPAPIEKTISKAKGQPREPQVYTLPPSRDELTKNQVSLTCLVKGFYPSDIAVEWESYGTEWSNYKTTPPVLDSDGSFFLYSKLTVTKSEWQQGFVFSCSVMHEALHNHYTQKSLSLSPGK

SEQ ID NO: 220 - protein, 217 aa, Artificial Sequence
  Synthetic construct
APELLGGPSVFLFPPKPKDTLMISRTPEVTCVVVDVSHEDPEVKFNWYVDGVEVHNAKTKPREEQYNSTYRVVSVLTVLHQDWLNGKEYKCKVSNKALPAPIEKTISKAKGQPREPQVYTLPPSRDELTKNQVSLTCLVKGFYPSDIAVEWESYGTEWSSYQTTPPVLDSDGSFFLYSKLTVTKSEWQQGFVFSCSVMHEALHNHYTQKSLSLSPGK

SEQ ID NO: 221 - protein, 217 aa, Artificial Sequence
  Synthetic construct
APELLGGPSVFLFPPKPKDTLMISRTPEVTCVVVDVSHEDPEVKFNWYVDGVEVHNAKTKPREEQYNSTYRVVSVLTVLHQDWLNGKEYKCKVSNKALPAPIEKTISKAKGQPREPQVYTLPPSRDELTKNQVSLTCLVKGFYPSDIAVEWESYGTEWSNYQTTPPVLDSDGSFFLYSKLTVTKSEWQQGFVFSCSVMHEALHNHYTQKSLSLSPGK

SEQ ID NO: 222 - protein, 217 aa, Artificial Sequence
  Synthetic construct
APELLGGPSVFLFPPKPKDTLMISRTPEVTCVVVDVSHEDPEVKFNWYVDGVEVHNAKTKPREEQYNSTYRVVSVLTVLHQDWLNGKEYKCKVSNKALPAPIEKTISKAKGQPREPQVYTLPPSRDELTKNQVSLTCLVKGFYPSDIAVLWESYGTEWSSYKTTPPVLDSDGSFFLYSKLTVTKSEWQQGFVFSCSVMHEALHNHYTQKSLSLSPGK

SEQ ID NO: 223 - protein, 217 aa, Artificial Sequence
  Synthetic construct
APELLGGPSVFLFPPKPKDTLMISRTPEVTCVVVDVSHEDPEVKFNWYVDGVEVHNAKTKPREEQYNSTYRVVSVLTVLHQDWLNGKEYKCKVSNKALPAPIEKTISKAKGQPREPQVYTLPPSRDELTKNQVSLTCLVKGFYPSDIAVLWESYGTEWSSYRTTPPVLDSDGSFFLYSKLTVTKSEWQQGFVFSCSVMHEALHNHYTQKSLSLSPGK

SEQ ID NO: 224 - protein, 217 aa, Artificial Sequence
  Synthetic construct
APELLGGPSVFLFPPKPKDTLMISRTPEVTCVVVDVSHEDPEVKFNWYVDGVEVHNAKTKPREEQYNSTYRVVSVLTVLHQDWLNGKEYKCKVSNKALPAPIEKTISKAKGQPREPQVYTLPPSRDELTKNQVSLTCLVKGFYPSDIAVLWESYGTEWSSYRTTPPVLDSDGSFFLYSKLTVTREEWQQGFVFSCSVMHEALHNHYTQKSLSLSPGK

SEQ ID NO: 225 - protein, 217 aa, Artificial Sequence
  Synthetic construct
APELLGGPSVFLFPPKPKDTLMISRTPEVTCVVVDVSHEDPEVKFNWYVDGVEVHNAKTKPREEQYNSTYRVVSVLTVLHQDWLNGKEYKCKVSNKALPAPIEKTISKAKGQPREPQVYTLPPSRDELTKNQVSLTCLVKGFYPSDIAVLWESYGTEWSSYRTTPPVLDSDGSFFLYSKLTVTGEEWQQGFVFSCSVMHEALHNHYTQKSLSLSPGK

SEQ ID NO: 226 - protein, 217 aa, Artificial Sequence
  Synthetic construct
APELLGGPSVFLFPPKPKDTLMISRTPEVTCVVVDVSHEDPEVKFNWYVDGVEVHNAKTKPREEQYNSTYRVVSVLTVLHQDWLNGKEYKCKVSNKALPAPIEKTISKAKGQPREPQVYTLPPSRDELTKNQVSLTCLVKGFYPSDIAVLWESYGTEWSSYRTTPPVLDSDGSFFLYSKLTVTREEWQQGFVFSCWVMHEALHNHYTQKSLSLSPGK

SEQ ID NO: 227 - protein, 217 aa, Artificial Sequence
  Synthetic construct
APELLGGPSVFLFPPKPKDTLMISRTPEVTCVVVDVSHEDPEVKFNWYVDGVEVHNAKTKPREEQYNSTYRVVSVLTVLHQDWLNGKEYKCKVSNKALPAPIEKTISKAKGQPREPQVYTLPPSRDELTKNQVSLTCLVKGFYPSDIAVLWESYGTEWSSYRTTPPVLDSDGSFFLYSKLTVTKEEWQQGFVFSCWVMHEALHNHYTQKSLSLSPGK

SEQ ID NO: 228 - protein, 217 aa, Artificial Sequence
  Synthetic construct
APELLGGPSVFLFPPKPKDTLMISRTPEVTCVVVDVSHEDPEVKFNWYVDGVEVHNAKTKPREEQYNSTYRVVSVLTVLHQDWLNGKEYKCKVSNKALPAPIEKTISKAKGQPREPQVYTLPPSRDELTKNQVSLTCLVKGFYPSDIAVLWESYGTEWSSYRTTPPVLDSDGSFFLYSKLTVTREEWQQGFVFTCWVMHEALHNHYTQKSLSLSPGK

SEQ ID NO: 229 - protein, 217 aa, Artificial Sequence
  Synthetic construct
APELLGGPSVFLFPPKPKDTLMISRTPEVTCVVVDVSHEDPEVKFNWYVDGVEVHNAKTKPREEQYNSTYRVVSVLTVLHQDWLNGKEYKCKVSNKALPAPIEKTISKAKGQPREPQVYTLPPSRDELTKNQVSLTCLVKGFYPSDIAVLWESYGTEWSSYRTTPPVLDSDGSFFLYSKLTVTREEWQQGFVFTCGVMHEALHNHYTQKSLSLSPGK

SEQ ID NO: 230 - protein, 217 aa, Artificial Sequence
  Synthetic construct
APELLGGPSVFLFPPKPKDTLMISRTPEVTCVVVDVSHEDPEVKFNWYVDGVEVHNAKTKPREEQYNSTYRVVSVLTVLHQDWLNGKEYKCKVSNKALPAPIEKTISKAKGQPREPQVYTLPPSRDELTKNQVSLTCLVKGFYPSDIAVLWESYGTEWSSYRTTPPVLDSDGSFFLYSKLTVTREEWQQGFVFECWVMHEALHNHYTQKSLSLSPGK

SEQ ID NO: 231 - protein, 217 aa, Artificial Sequence
  Synthetic construct
APELLGGPSVFLFPPKPKDTLMISRTPEVTCVVVDVSHEDPEVKFNWYVDGVEVHNAKTKPREEQYNSTYRVVSVLTVLHQDWLNGKEYKCKVSNKALPAPIEKTISKAKGQPREPQVYTLPPSRDELTKNQVSLTCLVKGFYPSDIAVLWESYGTEWSSYRTTPPVLDSDGSFFLYSKLTVTREEWQQGFVFKCWVMHEALHNHYTQKSLSLSPGK

SEQ ID NO: 232 - protein, 217 aa, Artificial Sequence
  Synthetic construct
APELLGGPSVFLFPPKPKDTLMISRTPEVTCVVVDVSHEDPEVKFNWYVDGVEVHNAKTKPREEQYNSTYRVVSVLTVLHQDWLNGKEYKCKVSNKALPAPIEKTISKAKGQPREPQVYTLPPSRDELTKNQVSLTCLVKGFYPSDIAVLWESYGTEWSSYRTTPPVLDSDGSFFLYSKLTVTPEEWQQGFVFKCWVMHEALHNHYTQKSLSLSPGK

SEQ ID NO: 233 - protein, 217 aa, Artificial Sequence
  Synthetic construct
APELLGGPSVFLFPPKPKDTLMISRTPEVTCVVVDVSHEDPEVKFNWYVDGVEVHNAKTKPREEQYNSTYRVVSVLTVLHQDWLNGKEYKCKVSNKALPAPIEKTISKAKGQPREPQVYTLPPSRDELTKNQVSLTCLVKGFYPSDIAVWWESYGTEWSSYRTTPPVLDSDGSFFLYSKLTVTREEWQQGFVFSCSVMHEALHNHYTQKSLSLSPGK

SEQ ID NO: 234 - protein, 217 aa, Artificial Sequence
  Synthetic construct
APELLGGPSVFLFPPKPKDTLMISRTPEVTCVVVDVSHEDPEVKFNWYVDGVEVHNAKTKPREEQYNSTYRVVSVLTVLHQDWLNGKEYKCKVSNKALPAPIEKTISKAKGQPREPQVYTLPPSRDELTKNQVSLTCLVKGFYPSDIAVWWESYGTEWSSYRTTPPVLDSDGSFFLYSKLTVTGEEWQQGFVFSCSVMHEALHNHYTQKSLSLSPGK

SEQ ID NO: 235 - protein, 217 aa, Artificial Sequence
  Synthetic construct
APELLGGPSVFLFPPKPKDTLMISRTPEVTCVVVDVSHEDPEVKFNWYVDGVEVHNAKTKPREEQYNSTYRVVSVLTVLHQDWLNGKEYKCKVSNKALPAPIEKTISKAKGQPREPQVYTLPPSRDELTKNQVSLTCLVKGFYPSDIAVWWESYGTEWSSYRTTPPVLDSDGSFFLYSKLTVTREEWQQGFVFTCWVMHEALHNHYTQKSLSLSPGK

SEQ ID NO: 236 - protein, 217 aa, Artificial Sequence
  Synthetic construct
APELLGGPSVFLFPPKPKDTLMISRTPEVTCVVVDVSHEDPEVKFNWYVDGVEVHNAKTKPREEQYNSTYRVVSVLTVLHQDWLNGKEYKCKVSNKALPAPIEKTISKAKGQPREPQVYTLPPSRDELTKNQVSLTCLVKGFYPSDIAVWWESYGTEWSSYRTTPPVLDSDGSFFLYSKLTVTGEEWQQGFVFTCWVMHEALHNHYTQKSLSLSPGK

SEQ ID NO: 237 - protein, 217 aa, Artificial Sequence
  Synthetic construct
APELLGGPSVFLFPPKPKDTLMISRTPEVTCVVVDVSHEDPEVKFNWYVDGVEVHNAKTKPREEQYNSTYRVVSVLTVLHQDWLNGKEYKCKVSNKALPAPIEKTISKAKGQPREPQVYTLPPSRDELTKNQVSLTCLVKGFYPSDIAVWWESYGTEWSSYRTTPPVLDSDGSFFLYSKLTVTREEWQQGFVFTCGVMHEALHNHYTQKSLSLSPGK

SEQ ID NO: 238 - protein, 217 aa, Artificial Sequence
  Synthetic construct
APELLGGPSVFLFPPKPKDTLMISRTPEVTCVVVDVSHEDPEVKFNWYVDGVEVHNAKTKPREEQYNSTYRVVSVLTVLHQDWLNGKEYKCKVSNKALPAPIEKTISKAKGQPREPQVYTLPPSRDELTKNQVSLTCLVKGFYPSDIAVLWESYGTEWSSYKTTPPVLDSDGSFFLYSKLTVTKEEWQQGFVFSCSVMHEALHNHYTQKSLSLSPGK

SEQ ID NO: 239 - protein, 217 aa, Artificial Sequence
  Synthetic construct
APELLGGPSVFLFPPKPKDTLMISRTPEVTCVVVDVSHEDPEVKFNWYVDGVEVHNAKTKPREEQYNSTYRVVSVLTVLHQDWLNGKEYKCKVSNKALPAPIEKTISKAKGQPREPQVYTLPPSRDELTKNQVSLTCLVKGFYPSDIAVLWESYGTEWSSYRTTPPVLDSDGSFFLYSKLTVTKEEWQQGFVFSCSVMHEALHNHYTQKSLSLSPGK

SEQ ID NO: 240 - protein, 217 aa, Artificial Sequence
  Synthetic construct
APELLGGPSVFLFPPKPKDTLMISRTPEVTCVVVDVSHEDPEVKFNWYVDGVEVHNAKTKPREEQYNSTYRVVSVLTVLHQDWLNGKEYKCKVSNKALPAPIEKTISKAKGQPREPQVYTLPPSRDELTKNQVSLTCLVKGFYPSDIAVEWESFGTEWSSYKTTPPVLDSDGSFFLYSKLTVTKEEWQQGFVFSCSVMHEALHNHYTQKSLSLSPGK

SEQ ID NO: 241 - protein, 217 aa, Artificial Sequence
  Synthetic construct
APELLGGPSVFLFPPKPKDTLMISRTPEVTCVVVDVSHEDPEVKFNWYVDGVEVHNAKTKPREEQYNSTYRVVSVLTVLHQDWLNGKEYKCKVSNKALPAPIEKTISKAKGQPREPQVYTLPPSRDELTKNQVSLTCLVKGFYPSDIAVEWESYGTEWASYKTTPPVLDSDGSFFLYSKLTVTKEEWQQGFVFSCSVMHEALHNHYTQKSLSLSPGK

SEQ ID NO: 242 - protein, 217 aa, Artificial Sequence
  Synthetic construct
APELLGGPSVFLFPPKPKDTLMISRTPEVTCVVVDVSHEDPEVKFNWYVDGVEVHNAKTKPREEQYNSTYRVVSVLTVLHQDWLNGKEYKCKVSNKALPAPIEKTISKAKGQPREPQVYTLPPSRDELTKNQVSLTCLVKGFYPSDIAVEWESYGTEWVSYKTTPPVLDSDGSFFLYSKLTVTKEEWQQGFVFSCSVMHEALHNHYTQKSLSLSPGK

SEQ ID NO: 243 - protein, 217 aa, Artificial Sequence
  Synthetic construct
APELLGGPSVFLFPPKPKDTLMISRTPEVTCVVVDVSHEDPEVKFNWYVDGVEVHNAKTKPREEQYNSTYRVVSVLTVLHQDWLNGKEYKCKVSNKALPAPIEKTISKAKGQPREPQVYTLPPSRDELTKNQVSLTCLVKGFYPSDIAVEWESYGTEWSSYKTTPPVLDSDGSFFLYSKLTVSKEEWQQGFVFSCSVMHEALHNHYTQKSLSLSPGK

SEQ ID NO: 244 - protein, 217 aa, Artificial Sequence
  Synthetic construct
APELLGGPSVFLFPPKPKDTLMISRTPEVTCVVVDVSHEDPEVKFNWYVDGVEVHNAKTKPREEQYNSTYRVVSVLTVLHQDWLNGKEYKCKVSNKALPAPIEKTISKAKGQPREPQVYTLPPSRDELTKNQVSLTCLVKGFYPSDIAVEWESFGTEWASYKTTPPVLDSDGSFFLYSKLTVTKEEWQQGFVFSCSVMHEALHNHYTQKSLSLSPGK

SEQ ID NO: 245 - protein, 217 aa, Artificial Sequence
  Synthetic construct
APELLGGPSVFLFPPKPKDTLMISRTPEVTCVVVDVSHEDPEVKFNWYVDGVEVHNAKTKPREEQYNSTYRVVSVLTVLHQDWLNGKEYKCKVSNKALPAPIEKTISKAKGQPREPQVYTLPPSRDELTKNQVSLTCLVKGFYPSDIAVEWESFGTEWVSYKTTPPVLDSDGSFFLYSKLTVTKEEWQQGFVFSCSVMHEALHNHYTQKSLSLSPGK

SEQ ID NO: 246 - protein, 217 aa, Artificial Sequence
  Synthetic construct
APELLGGPSVFLFPPKPKDTLMISRTPEVTCVVVDVSHEDPEVKFNWYVDGVEVHNAKTKPREEQYNSTYRVVSVLTVLHQDWLNGKEYKCKVSNKALPAPIEKTISKAKGQPREPQVYTLPPSRDELTKNQVSLTCLVKGFYPSDIAVWWESFGTEWSSYKTTPPVLDSDGSFFLYSKLTVTKEEWQQGFVFSCSVMHEALHNHYTQKSLSLSPGK

SEQ ID NO: 247 - protein, 217 aa, Artificial Sequence
  Synthetic construct
APELLGGPSVFLFPPKPKDTLMISRTPEVTCVVVDVSHEDPEVKFNWYVDGVEVHNAKTKPREEQYNSTYRVVSVLTVLHQDWLNGKEYKCKVSNKALPAPIEKTISKAKGQPREPQVYTLPPSRDELTKNQVSLTCLVKGFYPSDIAVWWESYGTEWASYKTTPPVLDSDGSFFLYSKLTVTKEEWQQGFVFSCSVMHEALHNHYTQKSLSLSPGK

SEQ ID NO: 248 - protein, 217 aa, Artificial Sequence
  Synthetic construct
APELLGGPSVFLFPPKPKDTLMISRTPEVTCVVVDVSHEDPEVKFNWYVDGVEVHNAKTKPREEQYNSTYRVVSVLTVLHQDWLNGKEYKCKVSNKALPAPIEKTISKAKGQPREPQVYTLPPSRDELTKNQVSLTCLVKGFYPSDIAVWWESYGTEWVSYKTTPPVLDSDGSFFLYSKLTVTKEEWQQGFVFSCSVMHEALHNHYTQKSLSLSPGK

SEQ ID NO: 249 - protein, 217 aa, Artificial Sequence
  Synthetic construct
APELLGGPSVFLFPPKPKDTLMISRTPEVTCVVVDVSHEDPEVKFNWYVDGVEVHNAKTKPREEQYNSTYRVVSVLTVLHQDWLNGKEYKCKVSNKALPAPIEKTISKAKGQPREPQVYTLPPSRDELTKNQVSLTCLVKGFYPSDIAVWWESYGTEWSSYKTTPPVLDSDGSFFLYSKLTVSKEEWQQGFVFSCSVMHEALHNHYTQKSLSLSPGK

SEQ ID NO: 250 - protein, 217 aa, Artificial Sequence
  Synthetic construct
APELLGGPSVFLFPPKPKDTLMISRTPEVTCVVVDVSHEDPEVKFNWYVDGVEVHNAKTKPREEQYNSTYRVVSVLTVLHQDWLNGKEYKCKVSNKALPAPIEKTISKAKGQPREPQVYTLPPSRDELTKNQVSLTCLVKGFYPSDIAVWWESFGTEWASYKTTPPVLDSDGSFFLYSKLTVTKEEWQQGFVFSCSVMHEALHNHYTQKSLSLSPGK

SEQ ID NO: 251 - protein, 217 aa, Artificial Sequence
  Synthetic construct
APELLGGPSVFLFPPKPKDTLMISRTPEVTCVVVDVSHEDPEVKFNWYVDGVEVHNAKTKPREEQYNSTYRVVSVLTVLHQDWLNGKEYKCKVSNKALPAPIEKTISKAKGQPREPQVYTLPPSRDELTKNQVSLTCLVKGFYPSDIAVWWESFGTEWVSYKTTPPVLDSDGSFFLYSKLTVTKEEWQQGFVFSCSVMHEALHNHYTQKSLSLSPGK

SEQ ID NO: 252 - protein, 217 aa, Artificial Sequence
  Synthetic construct
APELLGGPSVFLFPPKPKDTLMISRTPEVTCVVVDVSHEDPEVKFNWYVDGVEVHNAKTKPREEQYNSTYRVVSVLTVLHQDWLNGKEYKCKVSNKALPAPIEKTISKAKGQPREPQVYTLPPSRDELTKNQVSLTCLVKGFYPSDIAVEWESFGTEWSNYKTTPPVLDSDGSFFLYSKLTVTKEEWQQGFVFSCSVMHEALHNHYTQKSLSLSPGK

SEQ ID NO: 253 - protein, 217 aa, Artificial Sequence
  Synthetic construct
APELLGGPSVFLFPPKPKDTLMISRTPEVTCVVVDVSHEDPEVKFNWYVDGVEVHNAKTKPREEQYNSTYRVVSVLTVLHQDWLNGKEYKCKVSNKALPAPIEKTISKAKGQPREPQVYTLPPSRDELTKNQVSLTCLVKGFYPSDIAVEWESYGTEWANYKTTPPVLDSDGSFFLYSKLTVTKEEWQQGFVFSCSVMHEALHNHYTQKSLSLSPGK

SEQ ID NO: 254 - protein, 217 aa, Artificial Sequence
  Synthetic construct
APELLGGPSVFLFPPKPKDTLMISRTPEVTCVVVDVSHEDPEVKFNWYVDGVEVHNAKTKPREEQYNSTYRVVSVLTVLHQDWLNGKEYKCKVSNKALPAPIEKTISKAKGQPREPQVYTLPPSRDELTKNQVSLTCLVKGFYPSDIAVEWESYGTEWVNYKTTPPVLDSDGSFFLYSKLTVTKEEWQQGFVFSCSVMHEALHNHYTQKSLSLSPGK

SEQ ID NO: 255 - protein, 217 aa, Artificial Sequence
  Synthetic construct
APELLGGPSVFLFPPKPKDTLMISRTPEVTCVVVDVSHEDPEVKFNWYVDGVEVHNAKTKPREEQYNSTYRVVSVLTVLHQDWLNGKEYKCKVSNKALPAPIEKTISKAKGQPREPQVYTLPPSRDELTKNQVSLTCLVKGFYPSDIAVEWESYGTEWSNYKTTPPVLDSDGSFFLYSKLTVSKEEWQQGFVFSCSVMHEALHNHYTQKSLSLSPGK

SEQ ID NO: 256 - protein, 217 aa, Artificial Sequence
  Synthetic construct
APELLGGPSVFLFPPKPKDTLMISRTPEVTCVVVDVSHEDPEVKFNWYVDGVEVHNAKTKPREEQYNSTYRVVSVLTVLHQDWLNGKEYKCKVSNKALPAPIEKTISKAKGQPREPQVYTLPPSRDELTKNQVSLTCLVKGFYPSDIAVEWESFGTEWANYKTTPPVLDSDGSFFLYSKLTVTKEEWQQGFVFSCSVMHEALHNHYTQKSLSLSPGK

SEQ ID NO: 257 - protein, 217 aa, Artificial Sequence
  Synthetic construct
APELLGGPSVFLFPPKPKDTLMISRTPEVTCVVVDVSHEDPEVKFNWYVDGVEVHNAKTKPREEQYNSTYRVVSVLTVLHQDWLNGKEYKCKVSNKALPAPIEKTISKAKGQPREPQVYTLPPSRDELTKNQVSLTCLVKGFYPSDIAVEWESFGTEWVNYKTTPPVLDSDGSFFLYSKLTVTKEEWQQGFVFSCSVMHEALHNHYTQKSLSLSPGK

SEQ ID NO: 258 - protein, 217 aa, Artificial Sequence
  Synthetic construct
APELLGGPSVFLFPPKPKDTLMISRTPEVTCVVVDVSHEDPEVKFNWYVDGVEVHNAKTKPREEQYNSTYRVVSVLTVLHQDWLNGKEYKCKVSNKALPAPIEKTISKAKGQPREPQVYTLPPSRDELTKNQVSLTCLVKGFYPSDIAVWWESFGTEWSNYKTTPPVLDSDGSFFLYSKLTVTKEEWQQGFVFSCSVMHEALHNHYTQKSLSLSPGK

SEQ ID NO: 259 - protein, 217 aa, Artificial Sequence
  Synthetic construct
APELLGGPSVFLFPPKPKDTLMISRTPEVTCVVVDVSHEDPEVKFNWYVDGVEVHNAKTKPREEQYNSTYRVVSVLTVLHQDWLNGKEYKCKVSNKALPAPIEKTISKAKGQPREPQVYTLPPSRDELTKNQVSLTCLVKGFYPSDIAVWWESYGTEWANYKTTPPVLDSDGSFFLYSKLTVTKEEWQQGFVFSCSVMHEALHNHYTQKSLSLSPGK

SEQ ID NO: 260 - protein, 217 aa, Artificial Sequence
  Synthetic construct
APELLGGPSVFLFPPKPKDTLMISRTPEVTCVVVDVSHEDPEVKFNWYVDGVEVHNAKTKPREEQYNSTYRVVSVLTVLHQDWLNGKEYKCKVSNKALPAPIEKTISKAKGQPREPQVYTLPPSRDELTKNQVSLTCLVKGFYPSDIAVWWESYGTEWVNYKTTPPVLDSDGSFFLYSKLTVTKEEWQQGFVFSCSVMHEALHNHYTQKSLSLSPGK

SEQ ID NO: 261 - protein, 217 aa, Artificial Sequence
  Synthetic construct
APELLGGPSVFLFPPKPKDTLMISRTPEVTCVVVDVSHEDPEVKFNWYVDGVEVHNAKTKPREEQYNSTYRVVSVLTVLHQDWLNGKEYKCKVSNKALPAPIEKTISKAKGQPREPQVYTLPPSRDELTKNQVSLTCLVKGFYPSDIAVWWESYGTEWSNYKTTPPVLDSDGSFFLYSKLTVSKEEWQQGFVFSCSVMHEALHNHYTQKSLSLSPGK

SEQ ID NO: 262 - protein, 217 aa, Artificial Sequence
  Synthetic construct
APELLGGPSVFLFPPKPKDTLMISRTPEVTCVVVDVSHEDPEVKFNWYVDGVEVHNAKTKPREEQYNSTYRVVSVLTVLHQDWLNGKEYKCKVSNKALPAPIEKTISKAKGQPREPQVYTLPPSRDELTKNQVSLTCLVKGFYPSDIAVWWESFGTEWANYKTTPPVLDSDGSFFLYSKLTVTKEEWQQGFVFSCSVMHEALHNHYTQKSLSLSPGK

SEQ ID NO: 263 - protein, 217 aa, Artificial Sequence
  Synthetic construct
APELLGGPSVFLFPPKPKDTLMISRTPEVTCVVVDVSHEDPEVKFNWYVDGVEVHNAKTKPREEQYNSTYRVVSVLTVLHQDWLNGKEYKCKVSNKALPAPIEKTISKAKGQPREPQVYTLPPSRDELTKNQVSLTCLVKGFYPSDIAVWWESFGTEWVNYKTTPPVLDSDGSFFLYSKLTVTKEEWQQGFVFSCSVMHEALHNHYTQKSLSLSPGK

SEQ ID NO: 264 - protein, 217 aa, Artificial Sequence
  Synthetic construct
APELLGGPSVFLFPPKPKDTLMISRTPEVTCVVVDVSHEDPEVKFNWYVDGVEVHNAKTKPREEQYNSTYRVVSVLTVLHQDWLNGKEYKCKVSNKALPAPIEKTISKAKGQPREPQVYTLPPSRDELTKNQVSLTCLVKGFYPSDIAVLWESFGTEWSSYKTTPPVLDSDGSFFLYSKLTVTKEEWQQGFVFSCSVMHEALHNHYTQKSLSLSPGK

SEQ ID NO: 265 - protein, 217 aa, Artificial Sequence
  Synthetic construct
APELLGGPSVFLFPPKPKDTLMISRTPEVTCVVVDVSHEDPEVKFNWYVDGVEVHNAKTKPREEQYNSTYRVVSVLTVLHQDWLNGKEYKCKVSNKALPAPIEKTISKAKGQPREPQVYTLPPSRDELTKNQVSLTCLVKGFYPSDIAVLWESYGTEWASYKTTPPVLDSDGSFFLYSKLTVTKEEWQQGFVFSCSVMHEALHNHYTQKSLSLSPGK

SEQ ID NO: 266 - protein, 217 aa, Artificial Sequence
  Synthetic construct
APELLGGPSVFLFPPKPKDTLMISRTPEVTCVVVDVSHEDPEVKFNWYVDGVEVHNAKTKPREEQYNSTYRVVSVLTVLHQDWLNGKEYKCKVSNKALPAPIEKTISKAKGQPREPQVYTLPPSRDELTKNQVSLTCLVKGFYPSDIAVLWESYGTEWVSYKTTPPVLDSDGSFFLYSKLTVTKEEWQQGFVFSCSVMHEALHNHYTQKSLSLSPGK

SEQ ID NO: 267 - protein, 217 aa, Artificial Sequence
  Synthetic construct
APELLGGPSVFLFPPKPKDTLMISRTPEVTCVVVDVSHEDPEVKFNWYVDGVEVHNAKTKPREEQYNSTYRVVSVLTVLHQDWLNGKEYKCKVSNKALPAPIEKTISKAKGQPREPQVYTLPPSRDELTKNQVSLTCLVKGFYPSDIAVLWESYGTEWSSYKTTPPVLDSDGSFFLYSKLTVSKEEWQQGFVFSCSVMHEALHNHYTQKSLSLSPGK

SEQ ID NO: 268 - protein, 217 aa, Artificial Sequence
  Synthetic construct
APELLGGPSVFLFPPKPKDTLMISRTPEVTCVVVDVSHEDPEVKFNWYVDGVEVHNAKTKPREEQYNSTYRVVSVLTVLHQDWLNGKEYKCKVSNKALPAPIEKTISKAKGQPREPQVYTLPPSRDELTKNQVSLTCLVKGFYPSDIAVLWESFGTEWASYKTTPPVLDSDGSFFLYSKLTVTKEEWQQGFVFSCSVMHEALHNHYTQKSLSLSPGK

SEQ ID NO: 269 - protein, 217 aa, Artificial Sequence
  Synthetic construct
APELLGGPSVFLFPPKPKDTLMISRTPEVTCVVVDVSHEDPEVKFNWYVDGVEVHNAKTKPREEQYNSTYRVVSVLTVLHQDWLNGKEYKCKVSNKALPAPIEKTISKAKGQPREPQVYTLPPSRDELTKNQVSLTCLVKGFYPSDIAVLWESFGTEWVSYKTTPPVLDSDGSFFLYSKLTVTKEEWQQGFVFSCSVMHEALHNHYTQKSLSLSPGK

SEQ ID NO: 270 - protein, 217 aa, Artificial Sequence; identical to SEQ ID NO: 219
  Synthetic construct

SEQ ID NO: 271 - protein, 217 aa, Artificial Sequence
  Synthetic construct
APELLGGPSVFLFPPKPKDTLMISRTPEVTCVVVDVSHEDPEVKFNWYVDGVEVHNAKTKPREEQYNSTYRVVSVLTVLHQDWLNGKEYKCKVSNKALPAPIEKTISKAKGQPREPQVYTLPPSRDELTKNQVSLWCLVKGFYPSDIAVWWESYGTEWSSYKTTPPVLDSDGSFFLYSKLTVTKEEWQQGFVFSCSVMHEALHNHYTQKSLSLSPGK

SEQ ID NO: 272 - protein, 217 aa, Artificial Sequence
  Synthetic construct
APEAAGGPSVFLFPPKPKDTLMISRTPEVTCVVVDVSHEDPEVKFNWYVDGVEVHNAKTKPREEQYNSTYRVVSVLTVLHQDWLNGKEYKCKVSNKALPAPIEKTISKAKGQPREPQVYTLPPSRDELTKNQVSLWCLVKGFYPSDIAVWWESYGTEWSSYKTTPPVLDSDGSFFLYSKLTVTKEEWQQGFVFSCSVMHEALHNHYTQKSLSLSPGK

SEQ ID NO: 273 - protein, 217 aa, Artificial Sequence
  Synthetic construct
APELLGGPSVFLFPPKPKDTLYITREPEVTCVVVDVSHEDPEVKFNWYVDGVEVHNAKTKPREEQYNSTYRVVSVLTVLHQDWLNGKEYKCKVSNKALPAPIEKTISKAKGQPREPQVYTLPPSRDELTKNQVSLWCLVKGFYPSDIAVWWESYGTEWSSYKTTPPVLDSDGSFFLYSKLTVTKEEWQQGFVFSCSVMHEALHNHYTQKSLSLSPGK

SEQ ID NO: 274 - protein, 217 aa, Artificial Sequence
  Synthetic construct
APEAAGGPSVFLFPPKPKDTLYITREPEVTCVVVDVSHEDPEVKFNWYVDGVEVHNAKTKPREEQYNSTYRVVSVLTVLHQDWLNGKEYKCKVSNKALPAPIEKTISKAKGQPREPQVYTLPPSRDELTKNQVSLWCLVKGFYPSDIAVWWESYGTEWSSYKTTPPVLDSDGSFFLYSKLTVTKEEWQQGFVFSCSVMHEALHNHYTQKSLSLSPGK

SEQ ID NO: 275 - protein, 217 aa, Artificial Sequence
  Synthetic construct
APELLGGPSVFLFPPKPKDTLMISRTPEVTCVVVDVSHEDPEVKFNWYVDGVEVHNAKTKPREEQYNSTYRVVSVLTVLHQDWLNGKEYKCKVSNKALPAPIEKTISKAKGQPREPQVYTLPPSRDELTKNQVSLSCAVKGFYPSDIAVWWESYGTEWSSYKTTPPVLDSDGSFFLVSKLTVTKEEWQQGFVFSCSVMHEALHNHYTQKSLSLSPGK

SEQ ID NO: 276 - protein, 217 aa, Artificial Sequence
  Synthetic construct
APEAAGGPSVFLFPPKPKDTLMISRTPEVTCVVVDVSHEDPEVKFNWYVDGVEVHNAKTKPREEQYNSTYRVVSVLTVLHQDWLNGKEYKCKVSNKALPAPIEKTISKAKGQPREPQVYTLPPSRDELTKNQVSLSCAVKGFYPSDIAVWWESYGTEWSSYKTTPPVLDSDGSFFLVSKLTVTKEEWQQGFVFSCSVMHEALHNHYTQKSLSLSPGK

SEQ ID NO: 277 - protein, 217 aa, Artificial Sequence
  Synthetic construct
APELLGGPSVFLFPPKPKDTLYITREPEVTCVVVDVSHEDPEVKFNWYVDGVEVHNAKTKPREEQYNSTYRVVSVLTVLHQDWLNGKEYKCKVSNKALPAPIEKTISKAKGQPREPQVYTLPPSRDELTKNQVSLSCAVKGFYPSDIAVWWESYGTEWSSYKTTPPVLDSDGSFFLVSKLTVTKEEWQQGFVFSCSVMHEALHNHYTQKSLSLSPGK

SEQ ID NO: 278 - protein, 217 aa, Artificial Sequence
  Synthetic construct
APEAAGGPSVFLFPPKPKDTLYITREPEVTCVVVDVSHEDPEVKFNWYVDGVEVHNAKTKPREEQYNSTYRVVSVLTVLHQDWLNGKEYKCKVSNKALPAPIEKTISKAKGQPREPQVYTLPPSRDELTKNQVSLSCAVKGFYPSDIAVWWESYGTEWSSYKTTPPVLDSDGSFFLVSKLTVTKEEWQQGFVFSCSVMHEALHNHYTQKSLSLSPGK

SEQ ID NO: 279 - protein, 217 aa, Artificial Sequence
  Synthetic construct
APELLGGPSVFLFPPKPKDTLMISRTPEVTCVVVDVSHEDPEVKFNWYVDGVEVHNAKTKPREEQYNSTYRVVSVLTVLHQDWLNGKEYKCKVSNKALPAPIEKTISKAKGQPREPQVYTLPPSRDELTKNQVSLSCAVKGFYPSDIAVEWESNGQPENNYKTTPPVLDSDGSFFLVSKLTVDKSRWQQGNVFSCSVMHEALHNHYTQKSLSLSPGK

SEQ ID NO: 280 - protein, 217 aa, Artificial Sequence
  Synthetic construct
APEAAGGPSVFLFPPKPKDTLMISRTPEVTCVVVDVSHEDPEVKFNWYVDGVEVHNAKTKPREEQYNSTYRVVSVLTVLHQDWLNGKEYKCKVSNKALPAPIEKTISKAKGQPREPQVYTLPPSRDELTKNQVSLSCAVKGFYPSDIAVEWESNGQPENNYKTTPPVLDSDGSFFLVSKLTVDKSRWQQGNVFSCSVMHEALHNHYTQKSLSLSPGK

SEQ ID NO: 281 - protein, 217 aa, Artificial Sequence
  Synthetic construct
APELLGGPSVFLFPPKPKDTLYITREPEVTCVVVDVSHEDPEVKFNWYVDGVEVHNAKTKPREEQYNSTYRVVSVLTVLHQDWLNGKEYKCKVSNKALPAPIEKTISKAKGQPREPQVYTLPPSRDELTKNQVSLSCAVKGFYPSDIAVEWESNGQPENNYKTTPPVLDSDGSFFLVSKLTVDKSRWQQGNVFSCSVMHEALHNHYTQKSLSLSPGK

SEQ ID NO: 282 - protein, 217 aa, Artificial Sequence
  Synthetic construct
APEAAGGPSVFLFPPKPKDTLYITREPEVTCVVVDVSHEDPEVKFNWYVDGVEVHNAKTKPREEQYNSTYRVVSVLTVLHQDWLNGKEYKCKVSNKALPAPIEKTISKAKGQPREPQVYTLPPSRDELTKNQVSLSCAVKGFYPSDIAVEWESNGQPENNYKTTPPVLDSDGSFFLVSKLTVDKSRWQQGNVFSCSVMHEALHNHYTQKSLSLSPGK

SEQ ID NO: 283 - protein, 217 aa, Artificial Sequence
  Synthetic construct
APELLGGPSVFLFPPKPKDTLMISRTPEVTCVVVDVSHEDPEVKFNWYVDGVEVHNAKTKPREEQYNSTYRVVSVLTVLHQDWLNGKEYKCKVSNKALPAPIEKTISKAKGQPREPQVYTLPPSRDELTKNQVSLWCLVKGFYPSDIAVEWESNGQPENNYKTTPPVLDSDGSFFLYSKLTVDKSRWQQGNVFSCSVMHEALHNHYTQKSLSLSPGK

SEQ ID NO: 284 - protein, 217 aa, Artificial Sequence
  Synthetic construct
APEAAGGPSVFLFPPKPKDTLMISRTPEVTCVVVDVSHEDPEVKFNWYVDGVEVHNAKTKPREEQYNSTYRVVSVLTVLHQDWLNGKEYKCKVSNKALPAPIEKTISKAKGQPREPQVYTLPPSRDELTKNQVSLWCLVKGFYPSDIAVEWESNGQPENNYKTTPPVLDSDGSFFLYSKLTVDKSRWQQGNVFSCSVMHEALHNHYTQKSLSLSPGK

SEQ ID NO: 285 - protein, 217 aa, Artificial Sequence
  Synthetic construct
APELLGGPSVFLFPPKPKDTLYITREPEVTCVVVDVSHEDPEVKFNWYVDGVEVHNAKTKPREEQYNSTYRVVSVLTVLHQDWLNGKEYKCKVSNKALPAPIEKTISKAKGQPREPQVYTLPPSRDELTKNQVSLWCLVKGFYPSDIAVEWESNGQPENNYKTTPPVLDSDGSFFLYSKLTVDKSRWQQGNVFSCSVMHEALHNHYTQKSLSLSPGK

SEQ ID NO: 286 - protein, 217 aa, Artificial Sequence
  Synthetic construct
APEAAGGPSVFLFPPKPKDTLYITREPEVTCVVVDVSHEDPEVKFNWYVDGVEVHNAKTKPREEQYNSTYRVVSVLTVLHQDWLNGKEYKCKVSNKALPAPIEKTISKAKGQPREPQVYTLPPSRDELTKNQVSLWCLVKGFYPSDIAVEWESNGQPENNYKTTPPVLDSDGSFFLYSKLTVDKSRWQQGNVFSCSVMHEALHNHYTQKSLSLSPGK

SEQ ID NO: 287 - protein, 15 aa, Artificial Sequence
  Synthetic construct
EPKSCDKTHTCPPCP

SEQ ID NO: 288 - protein, 760 aa, Artificial Sequence
  Synthetic construct
MMDQARSAFSNLFGGEPLSYTRFSLARQVDGDNSHVEMKLAVDEEENADNNTKANVTKPKRCSGSICYGTIAVIVFFLIGFMIGYLGYCKGVEPKTECERLAGTESPVREEPGEDFPAARRLYWDDLKRKLSEKLDSTDFTGTIKLLNENSYVPREAGSQKDENLALYVENQFREFKLSKVWRDQHFVKIQVKDSAQNSVIIVDKNGRLVYLVENPGGYVAYSKAATVTGKLVHANFGTKKDFEDLYTPVNGSIVIVRAGKITFAEKVANAESLNAIGVLIYMDQTKFPIVNAELSFFGHAHLGTGDPYTPGFPSFNHTQFPPSRSSGLPNIPVQTISRAAAEKLFGNMEGDCPSDWKTDSTCRMVTSESKNVKLTVSNVLKEIKILNIFGVIKGFVEPDHYVVVGAQRDAWGPGAAKSGVGTALLLKLAQMFSDMVLKDGFQPSRSIIFASWSAGDFGSVGATEWLEGYLSSLHLKAFTYINLDKAVLGTSNFKVSASPLLYTLIEKTMQNVKHPVTGQFLYQDSNWASKVEKLTLDNAAFPFLAYSGIPAVSFCFCEDTDYPYLGTTMDTYKELIERIPELNKVARAAAEVAGQFVIKLTHDVELNLDYERYNSQLLSFVRDLNQYRADIKEMGLSLQWLYSARGDFFRATSRLTTDFGNAEKTDRFVMKKLNDRVMRVEYHFLSPYVSPKESPFRHVFWGSGSHTLPALLENLKLRKQNNGAFNETLFRNQLALATWTIQGAANALSGDVWDIDNEF

SEQ ID NO: 289 - protein, 217 aa, Artificial Sequence
  Synthetic construct
APELLGGPSVFLFPPKPKDTLMISRTPEVTCVVVDVSHEDPEVKFNWYVDGVEVHNAKTKPREEQYNSTYRVVSVLTVLHQDWLNGKEYKCKVSNKALPAPIEKTISKAKGQPRFDYVTTLPPSRDELTKNQVSLTCLVKGFYPSDIAVEWESNGQPENNYKTTPPVLDSDGSFFLYSKLTVDKSRWQQGNVFSCSVMHEALHNHYGFHDLSLSPGK

SEQ ID NO: 290 - protein, 217 aa, Artificial Sequence
  Synthetic construct
APELLGGPSVFLFPPKPKDTLMISRTPEVTCVVVDVSHEDPEVKFNWYVDGVEVHNAKTKPREEQYNSTYRVVSVLTVLHQDWLNGKEYKCKVSNKALPAPIEKTISKAKGQPRFDMVTTLPPSRDELTKNQVSLTCLVKGFYPSDIAVEWESNGQPENNYKTTPPVLDSDGSFFLYSKLTVDKSRWQQGNVFSCSVMHEALHNHYGFHDLSLSPGK

SEQ ID NO: 291 - protein, 217 aa, Artificial Sequence
  Synthetic construct
APELLGGPSVFLFPPKPKDTLMISRTPEVTCVVVDVSHEDPEVKFNWYVDGVEVHNAKTKPREEQYNSTYRVVSVLTVLHQDWLNGKEYKCKVSNKALPAPIEKTISKAKGQPRFEYVTTLPPSRDELTKNQVSLTCLVKGFYPSDIAVEWESNGQPENNYKTTPPVLDSDGSFFLYSKLTVDKSRWQQGNVFSCSVMHEALHNHYGFHDLSLSPGK

SEQ ID NO: 292 - protein, 217 aa, Artificial Sequence
  Synthetic construct
APELLGGPSVFLFPPKPKDTLMISRTPEVTCVVVDVSHEDPEVKFNWYVDGVEVHNAKTKPREEQYNSTYRVVSVLTVLHQDWLNGKEYKCKVSNKALPAPIEKTISKAKGQPRFEMVTTLPPSRDELTKNQVSLTCLVKGFYPSDIAVEWESNGQPENNYKTTPPVLDSDGSFFLYSKLTVDKSRWQQGNVFSCSVMHEALHNHYGFHDLSLSPGK

SEQ ID NO: 293 - protein, 217 aa, Artificial Sequence
  Synthetic construct
APELLGGPSVFLFPPKPKDTLMISRTPEVTCVVVDVSHEDPEVKFNWYVDGVEVHNAKTKPREEQYNSTYRVVSVLTVLHQDWLNGKEYKCKVSNKALPAPIEKTISKAKGQPRFELVTTLPPSRDELTKNQVSLTCLVKGFYPSDIAVEWESNGQPENNYKTTPPVLDSDGSFFLYSKLTVDKSRWQQGNVFSCSVMHEALHNHYGFHDLSLSPGK

SEQ ID NO: 294 - protein, 217 aa, Artificial Sequence
  Synthetic construct
APELLGGPSVFLFPPKPKDTLMISRTPEVTCVVVDVSHEDPEVEFIWYVDGVDVRYEWQLPREEQYNSTYRVVSVLTVLHQDWLNGKEYKCKVSNKALPAPIEKTISKAKGQPREPQVYTLPPSRDELTKNQVSLTCLVKGFYPSDIAVEWESNGQPENNYKTTPPVLDSDGSFFLYSKLTVDKSRWQQGNVFSCSVMHEALHNHYTQKSLSLSPGK

SEQ ID NO: 295 - protein, 217 aa, Artificial Sequence
  Synthetic construct
APELLGGPSVFLFPPKPKDTLMISRTPEVTCVVVDVSHEDPEVGFVWYVDGVPVSWEWYWPREEQYNSTYRVVSVLTVLHQDWLNGKEYKCKVSNKALPAPIEKTISKAKGQPREPQVYTLPPSRDELTKNQVSLTCLVKGFYPSDIAVEWESNGQPENNYKTTPPVLDSDGSFFLYSKLTVDKSRWQQGNVFSCSVMHEALHNHYTQKSLSLSPGK

SEQ ID NO: 296 - protein, 217 aa, Artificial Sequence
  Synthetic construct
APELLGGPSVFLFPPKPKDTLMISRTPEVTCVVVDVSHEDPEVQFDWYVDGVMVRREWHRPREEQYNSTYRVVSVLTVLHQDWLNGKEYKCKVSNKALPAPIEKTISKAKGQPREPQVYTLPPSRDELTKNQVSLTCLVKGFYPSDIAVEWESNGQPENNYKTTPPVLDSDGSFFLYSKLTVDKSRWQQGNVFSCSVMHEALHNHYTQKSLSLSPGK

SEQ ID NO: 297 - protein, 217 aa, Artificial Sequence
  Synthetic construct
APELLGGPSVFLFPPKPKDTLMISRTPEVTCVVVDVSHEDPEVSFEWYVDGVPVRWEWQWPREEQYNSTYRVVSVLTVLHQDWLNGKEYKCKVSNKALPAPIEKTISKAKGQPREPQVYTLPPSRDELTKNQVSLTCLVKGFYPSDIAVEWESNGQPENNYKTTPPVLDSDGSFFLYSKLTVDKSRWQQGNVFSCSVMHEALHNHYTQKSLSLSPGK

SEQ ID NO: 298 - protein, 217 aa, Artificial Sequence
  Synthetic construct
APELLGGPSVFLFPPKPKDTLMISRTPEVTCVVVDVSHEDPEVAFTWYVDGVPVRWEWQNPREEQYNSTYRVVSVLTVLHQDWLNGKEYKCKVSNKALPAPIEKTISKAKGQPREPQVYTLPPSRDELTKNQVSLTCLVKGFYPSDIAVEWESNGQPENNYKTTPPVLDSDGSFFLYSKLTVDKSRWQQGNVFSCSVMHEALHNHYTQKSLSLSPGK

SEQ ID NO: 299 - protein, 217 aa, Artificial Sequence
  Synthetic construct
APELLGGPSVFLFPPKPKDTLMISRTPEVTCVVVDPQTPPWEVKFNWYVDGVEVHNAKTKPREEEYYTYYRVVSVLTVLHQDWLNGKEYKCKVSNKALPAPIEKTISKAKGQPREPQVYTLPPSRDELTKNQVSLTCLVKGFYPSDIAVEWESNGQPENNYKTTPPVLDSDGSFFLYSKLTVDKSRWQQGNVFSCSVMHEALHNHYTQKSLSLSPGK

SEQ ID NO: 300 - protein, 217 aa, Artificial Sequence
  Synthetic construct
APELLGGPSVFLFPPKPKDTLMISRTPEVTCVVVDPPSPPWEVKFNWYVDGVEVHNAKTKPREEEYYSNYRVVSVLTVLHQDWLNGKEYKCKVSNKALPAPIEKTISKAKGQPREPQVYTLPPSRDELTKNQVSLTCLVKGFYPSDIAVEWESNGQPENNYKTTPPVLDSDGSFFLYSKLTVDKSRWQQGNVFSCSVMHEALHNHYTQKSLSLSPGK

SEQ ID NO: 301 - protein, 217 aa, Artificial Sequence
  Synthetic construct
APELLGGPSVFLFPPKPKDTLMISRTPEVTCVVVDPQTPPWEVKFNWYVDGVEVHNAKTKPREEEYYSNYRVVSVLTVLHQDWLNGKEYKCKVSNKALPAPIEKTISKAKGQPREPQVYTLPPSRDELTKNQVSLTCLVKGFYPSDIAVEWESNGQPENNYKTTPPVLDSDGSFFLYSKLTVDKSRWQQGNVFSCSVMHEALHNHYTQKSLSLSPGK

SEQ ID NO: 302 - protein, 217 aa, Artificial Sequence
  Synthetic construct
APELLGGPSVFLFPPKPKDTLMISRTPEVTCVVVDFRGPPWEVKFNWYVDGVEVHNAKTKPREEEYYHDYRVVSVLTVLHQDWLNGKEYKCKVSNKALPAPIEKTISKAKGQPREPQVYTLPPSRDELTKNQVSLTCLVKGFYPSDIAVEWESNGQPENNYKTTPPVLDSDGSFFLYSKLTVDKSRWQQGNVFSCSVMHEALHNHYTQKSLSLSPGK

SEQ ID NO: 303 - protein, 217 aa, Artificial Sequence
  Synthetic construct
APELLGGPSVFLFPPKPKDTLMISRTPEVTCVVVDPQTVPWEVKFNWYVDGVEVHNAKTKPREEEYYSNYRVVSVLTVLHQDWLNGKEYKCKVSNKALPAPIEKTISKAKGQPREPQVYTLPPSRDELTKNQVSLTCLVKGFYPSDIAVEWESNGQPENNYKTTPPVLDSDGSFFLYSKLTVDKSRWQQGNVFSCSVMHEALHNHYTQKSLSLSPGK

SEQ ID NO: 304 - protein, 217 aa, Artificial Sequence
  Synthetic construct
APELLGGPSVFLFPPKPKDTLMISRTPEVTCVVVDVSVPPRMVKFNWYVDGVEVHNAKTKSLTSQHNSTVRVVSVLTVLHQDWLNGKEYKCKVSNKALPAPIEKTISKAKGQPREPQVYTLPPSRDELTKNQVSLTCLVKGFYPSDIAVEWESNGQPENNYKTTPPVLDSDGSFFLYSKLTVDKSRWQQGNVFSCSVMHEALHNHYTQKSLSLSPGK

SEQ ID NO: 305 - protein, 217 aa, Artificial Sequence
  Synthetic construct
APELLGGPSVFLFPPKPKDTLMISRTPEVTCVVVDVSVPPWMVKFNWYVDGVEVHNAKTKSLTSQHNSTVRVVSVLTVLHQDWLNGKEYKCKVSNKALPAPIEKTISKAKGQPREPQVYTLPPSRDELTKNQVSLTCLVKGFYPSDIAVEWESNGQPENNYKTTPPVLDSDGSFFLYSKLTVDKSRWQQGNVFSCSVMHEALHNHYTQKSLSLSPGK

SEQ ID NO: 306 - protein, 217 aa, Artificial Sequence
  Synthetic construct
APELLGGPSVFLFPPKPKDTLMISRTPEVTCVVVDVSDMWEYVKFNWYVDGVEVHNAKTKPWVKQLNSTWRVVSVLTVLHQDWLNGKEYKCKVSNKALPAPIEKTISKAKGQPREPQVYTLPPSRDELTKNQVSLTCLVKGFYPSDIAVEWESNGQPENNYKTTPPVLDSDGSFFLYSKLTVDKSRWQQGNVFSCSVMHEALHNHYTQKSLSLSPGK

SEQ ID NO: 307 - protein, 217 aa, Artificial Sequence
  Synthetic construct
APELLGGPSVFLFPPKPKDTLMISRTPEVTCVVVDVSDDWTWVKFNWYVDGVEVHNAKTKPWIAQPNSTWRVVSVLTVLHQDWLNGKEYKCKVSNKALPAPIEKTISKAKGQPREPQVYTLPPSRDELTKNQVSLTCLVKGFYPSDIAVEWESNGQPENNYKTTPPVLDSDGSFFLYSKLTVDKSRWQQGNVFSCSVMHEALHNHYTQKSLSLSPGK

SEQ ID NO: 308 - protein, 217 aa, Artificial Sequence
  Synthetic construct
APELLGGPSVFLFPPKPKDTLMISRTPEVTCVVVDVSDDWEWVKFNWYVDGVEVHNAKTKPWKLQLNSTWRVVSVLTVLHQDWLNGKEYKCKVSNKALPAPIEKTISKAKGQPREPQVYTLPPSRDELTKNQVSLTCLVKGFYPSDIAVEWESNGQPENNYKTTPPVLDSDGSFFLYSKLTVDKSRWQQGNVFSCSVMHEALHNHYTQKSLSLSPGK

SEQ ID NO: 309 - protein, 217 aa, Artificial Sequence
  Synthetic construct
APELLGGPSVFLFPPKPKDTLMISRTPEVTCVVVDVSHEDPWVWFYWYVDGVEVHNAKTKPREEQYNSTYRVVSVLTVLHQDWLNGKEYKCSVVNIALWWSIEKTISKAKGQPREPQVYTLPPSRDELTKNQVSLTCLVKGFYPSDIAVEWESNGQPENNYKTTPPVLDSDGSFFLYSKLTVDKSRWQQGNVFSCSVMHEALHNHYTQKSLSLSPGK

SEQ ID NO: 310 - protein, 217 aa, Artificial Sequence
  Synthetic construct
APELLGGPSVFLFPPKPKDTLMISRTPEVTCVVVDVSHEDPVVGFRWYVDGVEVHNAKTKPREEQYNSTYRVVSVLTVLHQDWLNGKEYKCRVSNSALTWKIEKTISKAKGQPREPQVYTLPPSRDELTKNQVSLTCLVKGFYPSDIAVEWESNGQPENNYKTTPPVLDSDGSFFLYSKLTVDKSRWQQGNVFSCSVMHEALHNHYTQKSLSLSPGK

SEQ ID NO: 311 - protein, 217 aa, Artificial Sequence
  Synthetic construct
APELLGGPSVFLFPPKPKDTLMISRTPEVTCVVVDVSHEDPVVGFRWYVDGVEVHNAKTKPREEQYNSTYRVVSVLTVLHQDWLNGKEYKCRVSNSALSWRIEKTISKAKGQPREPQVYTLPPSRDELTKNQVSLTCLVKGFYPSDIAVEWESNGQPENNYKTTPPVLDSDGSFFLYSKLTVDKSRWQQGNVFSCSVMHEALHNHYTQKSLSLSPGK

SEQ ID NO: 312 - protein, 217 aa, Artificial Sequence
  Synthetic construct
APELLGGPSVFLFPPKPKDTLMISRTPEVTCVVVDVSHEDPIVGFRWYVDGVEVHNAKTKPREEQYNSTYRVVSVLTVLHQDWLNGKEYKCRVSNSALRWRIEKTISKAKGQPREPQVYTLPPSRDELTKNQVSLTCLVKGFYPSDIAVEWESNGQPENNYKTTPPVLDSDGSFFLYSKLTVDKSRWQQGNVFSCSVMHEALHNHYTQKSLSLSPGK

SEQ ID NO: 313 - protein, 217 aa, Artificial Sequence
  Synthetic construct
APELLGGPSVFLFPPKPKDTLMISRTPEVTCVVVDVSHEDPAVGFEWYVDGVEVHNAKTKPREEQYNSTYRVVSVLTVLHQDWLNGKEYKCQVFNWALDWVIEKTISKAKGQPREPQVYTLPPSRDELTKNQVSLTCLVKGFYPSDIAVEWESNGQPENNYKTTPPVLDSDGSFFLYSKLTVDKSRWQQGNVFSCSVMHEALHNHYTQKSLSLSPGK

SEQ ID NO: 314 - protein, 220 aa, Artificial Sequence
  Synthetic construct
EVKLVESGGGLVKPGGSLKLSCAASGFTFSSYGMSWVRQTPEKRLEWVASISGDGGSYIHYADSVKGRFTISRDSAKNTLYLQMSSLRSEDTALYYCARLPYWGQGTLVTVSAASTKGPSVFPLAPSSKSTSGGTAALGCLVKDYFPEPVTVSWNSGALTSGVHTFPAVLQSSGLYSLSSVVTVPSSSLGTQTYICNVNHKPSNTKVDKKVEPKSCDKTH

SEQ ID NO: 315 - protein, 220 aa, Artificial Sequence
  Synthetic construct
DIVMTQSPSSLTVTAGEKVTMSCKSSQSLLNSGNQKNYLTWYQQKPGQPPKLLIYWASTRESGVPDRFTGSGSGTDFTLTISNVQSEDLAEYFCQQYNSYPLTFGAGTKLELKRTVAAPSVFIFPPSDEQLKSGTASVVCLLNNFYPREAKVQWKVDNALQSGNSQESVTEQDSKDSTYSLSSTLTLSKADYEKHKVYACEVTHQGLSSPVTKSFNRGEC

SEQ ID NO: 316 - protein, 443 aa, Artificial Sequence
  Synthetic construct
EVKLVESGGGLVKPGGSLKLSCAASGFTFSSYGMSWVRQTPEKRLEWVASISGDGGSYIHYADSVKGRFTISRDSAKNTLYLQMSSLRSEDTALYYCARLPYWGQGTLVTVSAASTKGPSVFPLAPSSKSTSGGTAALGCLVKDYFPEPVTVSWNSGALTSGVHTFPAVLQSSGLYSLSSVVTVPSSSLGTQTYICNVNHKPSNTKVDKKVEPKSCDKTHTCPPCPAPEAAGGPSVFLFPPKPKDTLMISRTPEVTCVVVDVSHEDPEVKFNWYVDGVEVHNAKTKPREEQYNSTYRVVSVLTVLHQDWLNGKEYKCKVSNKALGAPIEKTISKAKGQPREPQVYTLPPSRDELTKNQVSLSCAVKGFYPSDIAVEWESNGQPENNYKTTPPVLDSDGSFFLVSKLTVDKSRWQQGNVFSCSVMHEALHNHYTQKSLSLSPGK

SEQ ID NO: 317 - protein, 443 aa, Artificial Sequence
  Synthetic construct
EVKLVESGGGLVKPGGSLKLSCAASGFTFSSYGMSWVRQTPEKRLEWVASISGDGGSYIHYADSVKGRFTISRDSAKNTLYLQMSSLRSEDTALYYCARLPYWGQGTLVTVSAASTKGPSVFPLAPSSKSTSGGTAALGCLVKDYFPEPVTVSWNSGALTSGVHTFPAVLQSSGLYSLSSVVTVPSSSLGTQTYICNVNHKPSNTKVDKKVEPKSCDKTHTCPPCPAPEAAGGPSVFLFPPKPKDTLMISRTPEVTCVVVDVSHEDPEVKFNWYVDGVEVHNAKTKPREEQYNSTYRVVSVLTVLHQDWLNGKEYKCKVSNKALGAPIEKTISKAKGQPREPQVYTLPPSRDELTKNQVSLWCLVKGFYPSDIAVWWESYGTEWSSYKTTPPVLDSDGSFFLYSKLTVTKEEWQQGFVFSCSVMHEALHNHYTQKSLSLSPGK

SEQ ID NO: 318 - protein, 443 aa, Artificial Sequence
  Synthetic construct
EVKLVESGGGLVKPGGSLKLSCAASGFTFSSYGMSWVRQTPEKRLEWVASISGDGGSYIHYADSVKGRFTISRDSAKNTLYLQMSSLRSEDTALYYCARLPYWGQGTLVTVSAASTKGPSVFPLAPSSKSTSGGTAALGCLVKDYFPEPVTVSWNSGALTSGVHTFPAVLQSSGLYSLSSVVTVPSSSLGTQTYICNVNHKPSNTKVDKKVEPKSCDKTHTCPPCPAPELLGGPSVFLFPPKPKDTLMISRTPEVTCVVVDVSHEDPEVKFNWYVDGVEVHNAKTKPREEQYNSTYRVVSVLTVLHQDWLNGKEYKCKVSNKALPAPIEKTISKAKGQPREPQVYTLPPSRDELTKNQVSLWCLVKGFYPSDIAVWWESYGTEWSSYKTTPPVLDSDGSFFLYSKLTVTKEEWQQGFVFSCSVMHEALHNHYTQKSLSLSPGK

SEQ ID NO: 319 - protein, 443 aa, Artificial Sequence
  Synthetic construct
EVKLVESGGGLVKPGGSLKLSCAASGFTFSSYGMSWVRQTPEKRLEWVASISGDGGSYIHYADSVKGRFTISRDSAKNTLYLQMSSLRSEDTALYYCARLPYWGQGTLVTVSAASTKGPSVFPLAPSSKSTSGGTAALGCLVKDYFPEPVTVSWNSGALTSGVHTFPAVLQSSGLYSLSSVVTVPSSSLGTQTYICNVNHKPSNTKVDKKVEPKSCDKTHTCPPCPAPEAAGGPSVFLFPPKPKDTLMISRTPEVTCVVVDVSHEDPEVKFNWYVDGVEVHNAKTKPREEQYNSTYRVVSVLTVLHQDWLNGKEYKCKVSNKALPAPIEKTISKAKGQPREPQVYTLPPSRDELTKNQVSLWCLVKGFYPSDIAVWWESYGTEWSSYKTTPPVLDSDGSFFLYSKLTVTKEEWQQGFVFSCSVMHEALHNHYTQKSLSLSPGK

SEQ ID NO: 320 - protein, 443 aa, Artificial Sequence
  Synthetic construct
EVKLVESGGGLVKPGGSLKLSCAASGFTFSSYGMSWVRQTPEKRLEWVASISGDGGSYIHYADSVKGRFTISRDSAKNTLYLQMSSLRSEDTALYYCARLPYWGQGTLVTVSAASTKGPSVFPLAPSSKSTSGGTAALGCLVKDYFPEPVTVSWNSGALTSGVHTFPAVLQSSGLYSLSSVVTVPSSSLGTQTYICNVNHKPSNTKVDKKVEPKSCDKTHTCPPCPAPELLGGPSVFLFPPKPKDTLYITREPEVTCVVVDVSHEDPEVKFNWYVDGVEVHNAKTKPREEQYNSTYRVVSVLTVLHQDWLNGKEYKCKVSNKALPAPIEKTISKAKGQPREPQVYTLPPSRDELTKNQVSLWCLVKGFYPSDIAVWWESYGTEWSSYKTTPPVLDSDGSFFLYSKLTVTKEEWQQGFVFSCSVMHEALHNHYTQKSLSLSPGK

SEQ ID NO: 321 - protein, 443 aa, Artificial Sequence
  Synthetic construct
EVKLVESGGGLVKPGGSLKLSCAASGFTFSSYGMSWVRQTPEKRLEWVASISGDGGSYIHYADSVKGRFTISRDSAKNTLYLQMSSLRSEDTALYYCARLPYWGQGTLVTVSAASTKGPSVFPLAPSSKSTSGGTAALGCLVKDYFPEPVTVSWNSGALTSGVHTFPAVLQSSGLYSLSSVVTVPSSSLGTQTYICNVNHKPSNTKVDKKVEPKSCDKTHTCPPCPAPEAAGGPSVFLFPPKPKDTLYITREPEVTCVVVDVSHEDPEVKFNWYVDGVEVHNAKTKPREEQYNSTYRVVSVLTVLHQDWLNGKEYKCKVSNKALPAPIEKTISKAKGQPREPQVYTLPPSRDELTKNQVSLWCLVKGFYPSDIAVWWESYGTEWSSYKTTPPVLDSDGSFFLYSKLTVTKEEWQQGFVFSCSVMHEALHNHYTQKSLSLSPGK

SEQ ID NO: 322 - protein, 443 aa, Artificial Sequence
  Synthetic construct
EVKLVESGGGLVKPGGSLKLSCAASGFTFSSYGMSWVRQTPEKRLEWVASISGDGGSYIHYADSVKGRFTISRDSAKNTLYLQMSSLRSEDTALYYCARLPYWGQGTLVTVSAASTKGPSVFPLAPSSKSTSGGTAALGCLVKDYFPEPVTVSWNSGALTSGVHTFPAVLQSSGLYSLSSVVTVPSSSLGTQTYICNVNHKPSNTKVDKKVEPKSCDKTHTCPPCPAPEAAGGPSVFLFPPKPKDTLYITREPEVTCVVVDVSHEDPEVKFNWYVDGVEVHNAKTKPREEQYNSTYRVVSVLTVLHQDWLNGKEYKCKVSNKALGAPIEKTISKAKGQPREPQVYTLPPSRDELTKNQVSLWCLVKGFYPSDIAVWWESYGTEWSSYKTTPPVLDSDGSFFLYSKLTVTKEEWQQGFVFSCSVMHEALHNHYTQKSLSLSPGK

SEQ ID NO: 323 - protein, 443 aa, Artificial Sequence
  Synthetic construct
EVKLVESGGGLVKPGGSLKLSCAASGFTFSSYGMSWVRQTPEKRLEWVASISGDGGSYIHYADSVKGRFTISRDSAKNTLYLQMSSLRSEDTALYYCARLPYWGQGTLVTVSAASTKGPSVFPLAPSSKSTSGGTAALGCLVKDYFPEPVTVSWNSGALTSGVHTFPAVLQSSGLYSLSSVVTVPSSSLGTQTYICNVNHKPSNTKVDKKVEPKSCDKTHTCPPCPAPELLGGPSVFLFPPKPKDTLMISRTPEVTCVVVDVSHEDPEVKFNWYVDGVEVHNAKTKPREEQYNSTYRVVSVLTVLHQDWLNGKEYKCKVSNKALPAPIEKTISKAKGQPREPQVYTLPPSRDELTKNQVSLSCAVKGFYPSDIAVWWESYGTEWSSYKTTPPVLDSDGSFFLVSKLTVTKEEWQQGFVFSCSVMHEALHNHYTQKSLSLSPGK

SEQ ID NO: 324 - protein, 443 aa, Artificial Sequence
  Synthetic construct
EVKLVESGGGLVKPGGSLKLSCAASGFTFSSYGMSWVRQTPEKRLEWVASISGDGGSYIHYADSVKGRFTISRDSAKNTLYLQMSSLRSEDTALYYCARLPYWGQGTLVTVSAASTKGPSVFPLAPSSKSTSGGTAALGCLVKDYFPEPVTVSWNSGALTSGVHTFPAVLQSSGLYSLSSVVTVPSSSLGTQTYICNVNHKPSNTKVDKKVEPKSCDKTHTCPPCPAPEAAGGPSVFLFPPKPKDTLMISRTPEVTCVVVDVSHEDPEVKFNWYVDGVEVHNAKTKPREEQYNSTYRVVSVLTVLHQDWLNGKEYKCKVSNKALPAPIEKTISKAKGQPREPQVYTLPPSRDELTKNQVSLSCAVKGFYPSDIAVWWESYGTEWSSYKTTPPVLDSDGSFFLVSKLTVTKEEWQQGFVFSCSVMHEALHNHYTQKSLSLSPGK

SEQ ID NO: 325 - protein, 443 aa, Artificial Sequence
  Synthetic construct
EVKLVESGGGLVKPGGSLKLSCAASGFTFSSYGMSWVRQTPEKRLEWVASISGDGGSYIHYADSVKGRFTISRDSAKNTLYLQMSSLRSEDTALYYCARLPYWGQGTLVTVSAASTKGPSVFPLAPSSKSTSGGTAALGCLVKDYFPEPVTVSWNSGALTSGVHTFPAVLQSSGLYSLSSVVTVPSSSLGTQTYICNVNHKPSNTKVDKKVEPKSCDKTHTCPPCPAPEAAGGPSVFLFPPKPKDTLMISRTPEVTCVVVDVSHEDPEVKFNWYVDGVEVHNAKTKPREEQYNSTYRVVSVLTVLHQDWLNGKEYKCKVSNKALGAPIEKTISKAKGQPREPQVYTLPPSRDELTKNQVSLSCAVKGFYPSDIAVWWESYGTEWSSYKTTPPVLDSDGSFFLVSKLTVTKEEWQQGFVFSCSVMHEALHNHYTQKSLSLSPGK

SEQ ID NO: 326 - protein, 443 aa, Artificial Sequence
  Synthetic construct
EVKLVESGGGLVKPGGSLKLSCAASGFTFSSYGMSWVRQTPEKRLEWVASISGDGGSYIHYADSVKGRFTISRDSAKNTLYLQMSSLRSEDTALYYCARLPYWGQGTLVTVSAASTKGPSVFPLAPSSKSTSGGTAALGCLVKDYFPEPVTVSWNSGALTSGVHTFPAVLQSSGLYSLSSVVTVPSSSLGTQTYICNVNHKPSNTKVDKKVEPKSCDKTHTCPPCPAPELLGGPSVFLFPPKPKDTLYITREPEVTCVVVDVSHEDPEVKFNWYVDGVEVHNAKTKPREEQYNSTYRVVSVLTVLHQDWLNGKEYKCKVSNKALPAPIEKTISKAKGQPREPQVYTLPPSRDELTKNQVSLSCAVKGFYPSDIAVWWESYGTEWSSYKTTPPVLDSDGSFFLVSKLTVTKEEWQQGFVFSCSVMHEALHNHYTQKSLSLSPGK

SEQ ID NO: 327 - protein, 443 aa, Artificial Sequence
  Synthetic construct
EVKLVESGGGLVKPGGSLKLSCAASGFTFSSYGMSWVRQTPEKRLEWVASISGDGGSYIHYADSVKGRFTISRDSAKNTLYLQMSSLRSEDTALYYCARLPYWGQGTLVTVSAASTKGPSVFPLAPSSKSTSGGTAALGCLVKDYFPEPVTVSWNSGALTSGVHTFPAVLQSSGLYSLSSVVTVPSSSLGTQTYICNVNHKPSNTKVDKKVEPKSCDKTHTCPPCPAPEAAGGPSVFLFPPKPKDTLYITREPEVTCVVVDVSHEDPEVKFNWYVDGVEVHNAKTKPREEQYNSTYRVVSVLTVLHQDWLNGKEYKCKVSNKALPAPIEKTISKAKGQPREPQVYTLPPSRDELTKNQVSLSCAVKGFYPSDIAVWWESYGTEWSSYKTTPPVLDSDGSFFLVSKLTVTKEEWQQGFVFSCSVMHEALHNHYTQKSLSLSPGK

SEQ ID NO: 328 - protein, 443 aa, Artificial Sequence
  Synthetic construct
EVKLVESGGGLVKPGGSLKLSCAASGFTFSSYGMSWVRQTPEKRLEWVASISGDGGSYIHYADSVKGRFTISRDSAKNTLYLQMSSLRSEDTALYYCARLPYWGQGTLVTVSAASTKGPSVFPLAPSSKSTSGGTAALGCLVKDYFPEPVTVSWNSGALTSGVHTFPAVLQSSGLYSLSSVVTVPSSSLGTQTYICNVNHKPSNTKVDKKVEPKSCDKTHTCPPCPAPEAAGGPSVFLFPPKPKDTLYITREPEVTCVVVDVSHEDPEVKFNWYVDGVEVHNAKTKPREEQYNSTYRVVSVLTVLHQDWLNGKEYKCKVSNKALGAPIEKTISKAKGQPREPQVYTLPPSRDELTKNQVSLSCAVKGFYPSDIAVWWESYGTEWSSYKTTPPVLDSDGSFFLVSKLTVTKEEWQQGFVFSCSVMHEALHNHYTQKSLSLSPGK

SEQ ID NO: 329 - protein, 443 aa, Artificial Sequence
  Synthetic construct
EVKLVESGGGLVKPGGSLKLSCAASGFTFSSYGMSWVRQTPEKRLEWVASISGDGGSYIHYADSVKGRFTISRDSAKNTLYLQMSSLRSEDTALYYCARLPYWGQGTLVTVSAASTKGPSVFPLAPSSKSTSGGTAALGCLVKDYFPEPVTVSWNSGALTSGVHTFPAVLQSSGLYSLSSVVTVPSSSLGTQTYICNVNHKPSNTKVDKKVEPKSCDKTHTCPPCPAPELLGGPSVFLFPPKPKDTLMISRTPEVTCVVVDVSHEDPEVKFNWYVDGVEVHNAKTKPREEQYNSTYRVVSVLTVLHQDWLNGKEYKCKVSNKALPAPIEKTISKAKGQPREPQVYTLPPSRDELTKNQVSLSCAVKGFYPSDIAVEWESNGQPENNYKTTPPVLDSDGSFFLVSKLTVDKSRWQQGNVFSCSVMHEALHNHYTQKSLSLSPGK

SEQ ID NO: 330 - protein, 443 aa, Artificial Sequence
  Synthetic construct
EVKLVESGGGLVKPGGSLKLSCAASGFTFSSYGMSWVRQTPEKRLEWVASISGDGGSYIHYADSVKGRFTISRDSAKNTLYLQMSSLRSEDTALYYCARLPYWGQGTLVTVSAASTKGPSVFPLAPSSKSTSGGTAALGCLVKDYFPEPVTVSWNSGALTSGVHTFPAVLQSSGLYSLSSVVTVPSSSLGTQTYICNVNHKPSNTKVDKKVEPKSCDKTHTCPPCPAPEAAGGPSVFLFPPKPKDTLMISRTPEVTCVVVDVSHEDPEVKFNWYVDGVEVHNAKTKPREEQYNSTYRVVSVLTVLHQDWLNGKEYKCKVSNKALPAPIEKTISKAKGQPREPQVYTLPPSRDELTKNQVSLSCAVKGFYPSDIAVEWESNGQPENNYKTTPPVLDSDGSFFLVSKLTVDKSRWQQGNVFSCSVMHEALHNHYTQKSLSLSPGK

SEQ ID NO: 331 - protein, 443 aa, Artificial Sequence
  Synthetic construct
EVKLVESGGGLVKPGGSLKLSCAASGFTFSSYGMSWVRQTPEKRLEWVASISGDGGSYIHYADSVKGRFTISRDSAKNTLYLQMSSLRSEDTALYYCARLPYWGQGTLVTVSAASTKGPSVFPLAPSSKSTSGGTAALGCLVKDYFPEPVTVSWNSGALTSGVHTFPAVLQSSGLYSLSSVVTVPSSSLGTQTYICNVNHKPSNTKVDKKVEPKSCDKTHTCPPCPAPELLGGPSVFLFPPKPKDTLYITREPEVTCVVVDVSHEDPEVKFNWYVDGVEVHNAKTKPREEQYNSTYRVVSVLTVLHQDWLNGKEYKCKVSNKALPAPIEKTISKAKGQPREPQVYTLPPSRDELTKNQVSLSCAVKGFYPSDIAVEWESNGQPENNYKTTPPVLDSDGSFFLVSKLTVDKSRWQQGNVFSCSVMHEALHNHYTQKSLSLSPGK

SEQ ID NO: 332 - protein, 443 aa, Artificial Sequence
  Synthetic construct
EVKLVESGGGLVKPGGSLKLSCAASGFTFSSYGMSWVRQTPEKRLEWVASISGDGGSYIHYADSVKGRFTISRDSAKNTLYLQMSSLRSEDTALYYCARLPYWGQGTLVTVSAASTKGPSVFPLAPSSKSTSGGTAALGCLVKDYFPEPVTVSWNSGALTSGVHTFPAVLQSSGLYSLSSVVTVPSSSLGTQTYICNVNHKPSNTKVDKKVEPKSCDKTHTCPPCPAPEAAGGPSVFLFPPKPKDTLYITREPEVTCVVVDVSHEDPEVKFNWYVDGVEVHNAKTKPREEQYNSTYRVVSVLTVLHQDWLNGKEYKCKVSNKALPAPIEKTISKAKGQPREPQVYTLPPSRDELTKNQVSLSCAVKGFYPSDIAVEWESNGQPENNYKTTPPVLDSDGSFFLVSKLTVDKSRWQQGNVFSCSVMHEALHNHYTQKSLSLSPGK

SEQ ID NO: 333 - protein, 443 aa, Artificial Sequence
  Synthetic construct
EVKLVESGGGLVKPGGSLKLSCAASGFTFSSYGMSWVRQTPEKRLEWVASISGDGGSYIHYADSVKGRFTISRDSAKNTLYLQMSSLRSEDTALYYCARLPYWGQGTLVTVSAASTKGPSVFPLAPSSKSTSGGTAALGCLVKDYFPEPVTVSWNSGALTSGVHTFPAVLQSSGLYSLSSVVTVPSSSLGTQTYICNVNHKPSNTKVDKKVEPKSCDKTHTCPPCPAPEAAGGPSVFLFPPKPKDTLYITREPEVTCVVVDVSHEDPEVKFNWYVDGVEVHNAKTKPREEQYNSTYRVVSVLTVLHQDWLNGKEYKCKVSNKALGAPIEKTISKAKGQPREPQVYTLPPSRDELTKNQVSLSCAVKGFYPSDIAVEWESNGQPENNYKTTPPVLDSDGSFFLVSKLTVDKSRWQQGNVFSCSVMHEALHNHYTQKSLSLSPGK

SEQ ID NO: 334 - protein, 443 aa, Artificial Sequence
  Synthetic construct
EVKLVESGGGLVKPGGSLKLSCAASGFTFSSYGMSWVRQTPEKRLEWVASISGDGGSYIHYADSVKGRFTISRDSAKNTLYLQMSSLRSEDTALYYCARLPYWGQGTLVTVSAASTKGPSVFPLAPSSKSTSGGTAALGCLVKDYFPEPVTVSWNSGALTSGVHTFPAVLQSSGLYSLSSVVTVPSSSLGTQTYICNVNHKPSNTKVDKKVEPKSCDKTHTCPPCPAPELLGGPSVFLFPPKPKDTLMISRTPEVTCVVVDVSHEDPEVKFNWYVDGVEVHNAKTKPREEQYNSTYRVVSVLTVLHQDWLNGKEYKCKVSNKALPAPIEKTISKAKGQPREPQVYTLPPSRDELTKNQVSLWCLVKGFYPSDIAVEWESNGQPENNYKTTPPVLDSDGSFFLYSKLTVDKSRWQQGNVFSCSVMHEALHNHYTQKSLSLSPGK

SEQ ID NO: 335 - protein, 443 aa, Artificial Sequence
  Synthetic construct
EVKLVESGGGLVKPGGSLKLSCAASGFTFSSYGMSWVRQTPEKRLEWVASISGDGGSYIHYADSVKGRFTISRDSAKNTLYLQMSSLRSEDTALYYCARLPYWGQGTLVTVSAASTKGPSVFPLAPSSKSTSGGTAALGCLVKDYFPEPVTVSWNSGALTSGVHTFPAVLQSSGLYSLSSVVTVPSSSLGTQTYICNVNHKPSNTKVDKKVEPKSCDKTHTCPPCPAPEAAGGPSVFLFPPKPKDTLMISRTPEVTCVVVDVSHEDPEVKFNWYVDGVEVHNAKTKPREEQYNSTYRVVSVLTVLHQDWLNGKEYKCKVSNKALPAPIEKTISKAKGQPREPQVYTLPPSRDELTKNQVSLWCLVKGFYPSDIAVEWESNGQPENNYKTTPPVLDSDGSFFLYSKLTVDKSRWQQGNVFSCSVMHEALHNHYTQKSLSLSPGK

SEQ ID NO: 336 - protein, 443 aa, Artificial Sequence
  Synthetic construct
EVKLVESGGGLVKPGGSLKLSCAASGFTFSSYGMSWVRQTPEKRLEWVASISGDGGSYIHYADSVKGRFTISRDSAKNTLYLQMSSLRSEDTALYYCARLPYWGQGTLVTVSAASTKGPSVFPLAPSSKSTSGGTAALGCLVKDYFPEPVTVSWNSGALTSGVHTFPAVLQSSGLYSLSSVVTVPSSSLGTQTYICNVNHKPSNTKVDKKVEPKSCDKTHTCPPCPAPEAAGGPSVFLFPPKPKDTLMISRTPEVTCVVVDVSHEDPEVKFNWYVDGVEVHNAKTKPREEQYNSTYRVVSVLTVLHQDWLNGKEYKCKVSNKALGAPIEKTISKAKGQPREPQVYTLPPSRDELTKNQVSLWCLVKGFYPSDIAVEWESNGQPENNYKTTPPVLDSDGSFFLYSKLTVDKSRWQQGNVFSCSVMHEALHNHYTQKSLSLSPGK

SEQ ID NO: 337 - protein, 443 aa, Artificial Sequence
  Synthetic construct
EVKLVESGGGLVKPGGSLKLSCAASGFTFSSYGMSWVRQTPEKRLEWVASISGDGGSYIHYADSVKGRFTISRDSAKNTLYLQMSSLRSEDTALYYCARLPYWGQGTLVTVSAASTKGPSVFPLAPSSKSTSGGTAALGCLVKDYFPEPVTVSWNSGALTSGVHTFPAVLQSSGLYSLSSVVTVPSSSLGTQTYICNVNHKPSNTKVDKKVEPKSCDKTHTCPPCPAPELLGGPSVFLFPPKPKDTLYITREPEVTCVVVDVSHEDPEVKFNWYVDGVEVHNAKTKPREEQYNSTYRVVSVLTVLHQDWLNGKEYKCKVSNKALPAPIEKTISKAKGQPREPQVYTLPPSRDELTKNQVSLWCLVKGFYPSDIAVEWESNGQPENNYKTTPPVLDSDGSFFLYSKLTVDKSRWQQGNVFSCSVMHEALHNHYTQKSLSLSPGK

SEQ ID NO: 338 - protein, 443 aa, Artificial Sequence
  Synthetic construct
EVKLVESGGGLVKPGGSLKLSCAASGFTFSSYGMSWVRQTPEKRLEWVASISGDGGSYIHYADSVKGRFTISRDSAKNTLYLQMSSLRSEDTALYYCARLPYWGQGTLVTVSAASTKGPSVFPLAPSSKSTSGGTAALGCLVKDYFPEPVTVSWNSGALTSGVHTFPAVLQSSGLYSLSSVVTVPSSSLGTQTYICNVNHKPSNTKVDKKVEPKSCDKTHTCPPCPAPEAAGGPSVFLFPPKPKDTLYITREPEVTCVVVDVSHEDPEVKFNWYVDGVEVHNAKTKPREEQYNSTYRVVSVLTVLHQDWLNGKEYKCKVSNKALPAPIEKTISKAKGQPREPQVYTLPPSRDELTKNQVSLWCLVKGFYPSDIAVEWESNGQPENNYKTTPPVLDSDGSFFLYSKLTVDKSRWQQGNVFSCSVMHEALHNHYTQKSLSLSPGK

SEQ ID NO: 339 - protein, 443 aa, Artificial Sequence
  Synthetic construct
EVKLVESGGGLVKPGGSLKLSCAASGFTFSSYGMSWVRQTPEKRLEWVASISGDGGSYIHYADSVKGRFTISRDSAKNTLYLQMSSLRSEDTALYYCARLPYWGQGTLVTVSAASTKGPSVFPLAPSSKSTSGGTAALGCLVKDYFPEPVTVSWNSGALTSGVHTFPAVLQSSGLYSLSSVVTVPSSSLGTQTYICNVNHKPSNTKVDKKVEPKSCDKTHTCPPCPAPEAAGGPSVFLFPPKPKDTLYITREPEVTCVVVDVSHEDPEVKFNWYVDGVEVHNAKTKPREEQYNSTYRVVSVLTVLHQDWLNGKEYKCKVSNKALGAPIEKTISKAKGQPREPQVYTLPPSRDELTKNQVSLWCLVKGFYPSDIAVEWESNGQPENNYKTTPPVLDSDGSFFLYSKLTVDKSRWQQGNVFSCSVMHEALHNHYTQKSLSLSPGK

SEQ ID NO: 340 - protein, 217 aa, Artificial Sequence
  Synthetic construct
APEAAGGPSVFLFPPKPKDTLYITREPEVTCVVVDVSHEDPEVKFNWYVDGVEVHNAKTKPREEQYNSTYRVVSVLTVLHQDWLNGKEYKCKVSNKALGAPIEKTISKAKGQPREPQVYTLPPSRDELTKNQVSLTCLVKGFYPSDIAVEWESYGTEWSSYKTTPPVLDSDGSFFLYSKLTVTKEEWQQGFVFSCSVMHEALHNHYTQKSLSLSPGK

SEQ ID NO: 341 - protein, 217 aa, Artificial Sequence
  Synthetic construct
APEAAGGPSVFLFPPKPKDTLYITREPEVTCVVVDVSHEDPEVKFNWYVDGVEVHNAKTKPREEQYNSTYRVVSVLTVLHQDWLNGKEYKCKVSNKALGAPIEKTISKAKGQPREPQVYTLPPSRDELTKNQVSLTCLVKGFYPSDIAVEWESFGTEWSSYKTTPPVLDSDGSFFLYSKLTVTKEEWQQGFVFSCSVMHEALHNHYTQKSLSLSPGK

SEQ ID NO: 342 - protein, 217 aa, Artificial Sequence
  Synthetic construct
APELLGGPSVFLFPPKPKDTLMISRTPEVTCVVVDVSHEDPEVKFNWYVDGVEVHNAKTKPREEQYNSTYRVVSVLTVLHQDWLNGKEYKCKVSNKALPAPIEKTISKAKGQPREPQVYTLPPSRDELTKNQVSLWCLVKGFYPSDIAVEWESFGTEWSSYKTTPPVLDSDGSFFLYSKLTVTKEEWQQGFVFSCSVMHEALHNHYTQKSLSLSPGK

SEQ ID NO: 343 - protein, 217 aa, Artificial Sequence
  Synthetic construct
APEAAGGPSVFLFPPKPKDTLMISRTPEVTCVVVDVSHEDPEVKFNWYVDGVEVHNAKTKPREEQYNSTYRVVSVLTVLHQDWLNGKEYKCKVSNKALPAPIEKTISKAKGQPREPQVYTLPPSRDELTKNQVSLWCLVKGFYPSDIAVEWESFGTEWSSYKTTPPVLDSDGSFFLYSKLTVTKEEWQQGFVFSCSVMHEALHNHYTQKSLSLSPGK

SEQ ID NO: 344 - protein, 217 aa, Artificial Sequence
  Synthetic construct
APEAAGGPSVFLFPPKPKDTLMISRTPEVTCVVVDVSHEDPEVKFNWYVDGVEVHNAKTKPREEQYNSTYRVVSVLTVLHQDWLNGKEYKCKVSNKALGAPIEKTISKAKGQPREPQVYTLPPSRDELTKNQVSLWCLVKGFYPSDIAVEWESFGTEWSSYKTTPPVLDSDGSFFLYSKLTVTKEEWQQGFVFSCSVMHEALHNHYTQKSLSLSPGK

SEQ ID NO: 345 - protein, 217 aa, Artificial Sequence
  Synthetic construct
APELLGGPSVFLFPPKPKDTLYITREPEVTCVVVDVSHEDPEVKFNWYVDGVEVHNAKTKPREEQYNSTYRVVSVLTVLHQDWLNGKEYKCKVSNKALPAPIEKTISKAKGQPREPQVYTLPPSRDELTKNQVSLWCLVKGFYPSDIAVEWESFGTEWSSYKTTPPVLDSDGSFFLYSKLTVTKEEWQQGFVFSCSVMHEALHNHYTQKSLSLSPGK

SEQ ID NO: 346 - protein, 217 aa, Artificial Sequence
  Synthetic construct
APEAAGGPSVFLFPPKPKDTLYITREPEVTCVVVDVSHEDPEVKFNWYVDGVEVHNAKTKPREEQYNSTYRVVSVLTVLHQDWLNGKEYKCKVSNKALPAPIEKTISKAKGQPREPQVYTLPPSRDELTKNQVSLWCLVKGFYPSDIAVEWESFGTEWSSYKTTPPVLDSDGSFFLYSKLTVTKEEWQQGFVFSCSVMHEALHNHYTQKSLSLSPGK

SEQ ID NO: 347 - protein, 217 aa, Artificial Sequence
  Synthetic construct
APEAAGGPSVFLFPPKPKDTLYITREPEVTCVVVDVSHEDPEVKFNWYVDGVEVHNAKTKPREEQYNSTYRVVSVLTVLHQDWLNGKEYKCKVSNKALGAPIEKTISKAKGQPREPQVYTLPPSRDELTKNQVSLWCLVKGFYPSDIAVEWESFGTEWSSYKTTPPVLDSDGSFFLYSKLTVTKEEWQQGFVFSCSVMHEALHNHYTQKSLSLSPGK

SEQ ID NO: 348 - protein, 217 aa, Artificial Sequence
  Synthetic construct
APELLGGPSVFLFPPKPKDTLMISRTPEVTCVVVDVSHEDPEVKFNWYVDGVEVHNAKTKPREEQYNSTYRVVSVLTVLHQDWLNGKEYKCKVSNKALPAPIEKTISKAKGQPREPQVYTLPPSRDELTKNQVSLSCAVKGFYPSDIAVEWESFGTEWSSYKTTPPVLDSDGSFFLVSKLTVTKEEWQQGFVFSCSVMHEALHNHYTQKSLSLSPGK

SEQ ID NO: 349 - protein, 217 aa, Artificial Sequence
  Synthetic construct
APEAAGGPSVFLFPPKPKDTLMISRTPEVTCVVVDVSHEDPEVKFNWYVDGVEVHNAKTKPREEQYNSTYRVVSVLTVLHQDWLNGKEYKCKVSNKALPAPIEKTISKAKGQPREPQVYTLPPSRDELTKNQVSLSCAVKGFYPSDIAVEWESFGTEWSSYKTTPPVLDSDGSFFLVSKLTVTKEEWQQGFVFSCSVMHEALHNHYTQKSLSLSPGK

SEQ ID NO: 350 - protein, 217 aa, Artificial Sequence
  Synthetic construct
APEAAGGPSVFLFPPKPKDTLMISRTPEVTCVVVDVSHEDPEVKFNWYVDGVEVHNAKTKPREEQYNSTYRVVSVLTVLHQDWLNGKEYKCKVSNKALGAPIEKTISKAKGQPREPQVYTLPPSRDELTKNQVSLSCAVKGFYPSDIAVEWESFGTEWSSYKTTPPVLDSDGSFFLVSKLTVTKEEWQQGFVFSCSVMHEALHNHYTQKSLSLSPGK

SEQ ID NO: 351 - protein, 217 aa, Artificial Sequence
  Synthetic construct
APELLGGPSVFLFPPKPKDTLYITREPEVTCVVVDVSHEDPEVKFNWYVDGVEVHNAKTKPREEQYNSTYRVVSVLTVLHQDWLNGKEYKCKVSNKALPAPIEKTISKAKGQPREPQVYTLPPSRDELTKNQVSLSCAVKGFYPSDIAVEWESFGTEWSSYKTTPPVLDSDGSFFLVSKLTVTKEEWQQGFVFSCSVMHEALHNHYTQKSLSLSPGK

SEQ ID NO: 352 - protein, 217 aa, Artificial Sequence
  Synthetic construct
APEAAGGPSVFLFPPKPKDTLYITREPEVTCVVVDVSHEDPEVKFNWYVDGVEVHNAKTKPREEQYNSTYRVVSVLTVLHQDWLNGKEYKCKVSNKALPAPIEKTISKAKGQPREPQVYTLPPSRDELTKNQVSLSCAVKGFYPSDIAVEWESFGTEWSSYKTTPPVLDSDGSFFLVSKLTVTKEEWQQGFVFSCSVMHEALHNHYTQKSLSLSPGK

SEQ ID NO: 353 - protein, 217 aa, Artificial Sequence
  Synthetic construct
APEAAGGPSVFLFPPKPKDTLYITREPEVTCVVVDVSHEDPEVKFNWYVDGVEVHNAKTKPREEQYNSTYRVVSVLTVLHQDWLNGKEYKCKVSNKALGAPIEKTISKAKGQPREPQVYTLPPSRDELTKNQVSLSCAVKGFYPSDIAVEWESFGTEWSSYKTTPPVLDSDGSFFLVSKLTVTKEEWQQGFVFSCSVMHEALHNHYTQKSLSLSPGK

SEQ ID NO: 354 - protein, 217 aa, Artificial Sequence
  Synthetic construct
APELLGGPSVFLFPPKPKDTLMISRTPEVTCVVVDVSHEDPEVKFNWYVDGVEVHNAKTKPREEQYNSTYRVVSVLTVLHQDWLNGKEYKCKVSNKALPAPIEKTISKAKGQPREPQVYTLPPSRDELTKNQVSLWCLVKGFYPSDIAVEWESYGTEWANYKTTPPVLDSDGSFFLYSKLTVTKEEWQQGFVFSCSVMHEALHNHYTQKSLSLSPGK

SEQ ID NO: 355 - protein, 217 aa, Artificial Sequence
  Synthetic construct
APEAAGGPSVFLFPPKPKDTLMISRTPEVTCVVVDVSHEDPEVKFNWYVDGVEVHNAKTKPREEQYNSTYRVVSVLTVLHQDWLNGKEYKCKVSNKALPAPIEKTISKAKGQPREPQVYTLPPSRDELTKNQVSLWCLVKGFYPSDIAVEWESYGTEWANYKTTPPVLDSDGSFFLYSKLTVTKEEWQQGFVFSCSVMHEALHNHYTQKSLSLSPGK

SEQ ID NO: 356 - protein, 217 aa, Artificial Sequence
  Synthetic construct
APEAAGGPSVFLFPPKPKDTLMISRTPEVTCVVVDVSHEDPEVKFNWYVDGVEVHNAKTKPREEQYNSTYRVVSVLTVLHQDWLNGKEYKCKVSNKALGAPIEKTISKAKGQPREPQVYTLPPSRDELTKNQVSLWCLVKGFYPSDIAVEWESYGTEWANYKTTPPVLDSDGSFFLYSKLTVTKEEWQQGFVFSCSVMHEALHNHYTQKSLSLSPGK

SEQ ID NO: 357 - protein, 217 aa, Artificial Sequence
  Synthetic construct
APELLGGPSVFLFPPKPKDTLYITREPEVTCVVVDVSHEDPEVKFNWYVDGVEVHNAKTKPREEQYNSTYRVVSVLTVLHQDWLNGKEYKCKVSNKALPAPIEKTISKAKGQPREPQVYTLPPSRDELTKNQVSLWCLVKGFYPSDIAVEWESYGTEWANYKTTPPVLDSDGSFFLYSKLTVTKEEWQQGFVFSCSVMHEALHNHYTQKSLSLSPGK

SEQ ID NO: 358 - protein, 217 aa, Artificial Sequence
  Synthetic construct
APEAAGGPSVFLFPPKPKDTLYITREPEVTCVVVDVSHEDPEVKFNWYVDGVEVHNAKTKPREEQYNSTYRVVSVLTVLHQDWLNGKEYKCKVSNKALPAPIEKTISKAKGQPREPQVYTLPPSRDELTKNQVSLWCLVKGFYPSDIAVEWESYGTEWANYKTTPPVLDSDGSFFLYSKLTVTKEEWQQGFVFSCSVMHEALHNHYTQKSLSLSPGK

SEQ ID NO: 359 - protein, 217 aa, Artificial Sequence
  Synthetic construct
APEAAGGPSVFLFPPKPKDTLYITREPEVTCVVVDVSHEDPEVKFNWYVDGVEVHNAKTKPREEQYNSTYRVVSVLTVLHQDWLNGKEYKCKVSNKALGAPIEKTISKAKGQPREPQVYTLPPSRDELTKNQVSLWCLVKGFYPSDIAVEWESYGTEWANYKTTPPVLDSDGSFFLYSKLTVTKEEWQQGFVFSCSVMHEALHNHYTQKSLSLSPGK

SEQ ID NO: 360 - protein, 217 aa, Artificial Sequence
  Synthetic construct
APELLGGPSVFLFPPKPKDTLMISRTPEVTCVVVDVSHEDPEVKFNWYVDGVEVHNAKTKPREEQYNSTYRVVSVLTVLHQDWLNGKEYKCKVSNKALPAPIEKTISKAKGQPREPQVYTLPPSRDELTKNQVSLSCAVKGFYPSDIAVEWESYGTEWANYKTTPPVLDSDGSFFLVSKLTVTKEEWQQGFVFSCSVMHEALHNHYTQKSLSLSPGK

SEQ ID NO: 361 - protein, 217 aa, Artificial Sequence
  Synthetic construct
APEAAGGPSVFLFPPKPKDTLMISRTPEVTCVVVDVSHEDPEVKFNWYVDGVEVHNAKTKPREEQYNSTYRVVSVLTVLHQDWLNGKEYKCKVSNKALPAPIEKTISKAKGQPREPQVYTLPPSRDELTKNQVSLSCAVKGFYPSDIAVEWESYGTEWANYKTTPPVLDSDGSFFLVSKLTVTKEEWQQGFVFSCSVMHEALHNHYTQKSLSLSPGK

SEQ ID NO: 362 - protein, 217 aa, Artificial Sequence
  Synthetic construct
APEAAGGPSVFLFPPKPKDTLMISRTPEVTCVVVDVSHEDPEVKFNWYVDGVEVHNAKTKPREEQYNSTYRVVSVLTVLHQDWLNGKEYKCKVSNKALGAPIEKTISKAKGQPREPQVYTLPPSRDELTKNQVSLSCAVKGFYPSDIAVEWESYGTEWANYKTTPPVLDSDGSFFLVSKLTVTKEEWQQGFVFSCSVMHEALHNHYTQKSLSLSPGK

SEQ ID NO: 363 - protein, 217 aa, Artificial Sequence
  Synthetic construct
APELLGGPSVFLFPPKPKDTLYITREPEVTCVVVDVSHEDPEVKFNWYVDGVEVHNAKTKPREEQYNSTYRVVSVLTVLHQDWLNGKEYKCKVSNKALPAPIEKTISKAKGQPREPQVYTLPPSRDELTKNQVSLSCAVKGFYPSDIAVEWESYGTEWANYKTTPPVLDSDGSFFLVSKLTVTKEEWQQGFVFSCSVMHEALHNHYTQKSLSLSPGK

SEQ ID NO: 364 - protein, 217 aa, Artificial Sequence
  Synthetic construct
APEAAGGPSVFLFPPKPKDTLYITREPEVTCVVVDVSHEDPEVKFNWYVDGVEVHNAKTKPREEQYNSTYRVVSVLTVLHQDWLNGKEYKCKVSNKALPAPIEKTISKAKGQPREPQVYTLPPSRDELTKNQVSLSCAVKGFYPSDIAVEWESYGTEWANYKTTPPVLDSDGSFFLVSKLTVTKEEWQQGFVFSCSVMHEALHNHYTQKSLSLSPGK

SEQ ID NO: 365 - protein, 217 aa, Artificial Sequence
  Synthetic construct
APEAAGGPSVFLFPPKPKDTLYITREPEVTCVVVDVSHEDPEVKFNWYVDGVEVHNAKTKPREEQYNSTYRVVSVLTVLHQDWLNGKEYKCKVSNKALGAPIEKTISKAKGQPREPQVYTLPPSRDELTKNQVSLSCAVKGFYPSDIAVEWESYGTEWANYKTTPPVLDSDGSFFLVSKLTVTKEEWQQGFVFSCSVMHEALHNHYTQKSLSLSPGK

SEQ ID NO: 366 - protein, 217 aa, Artificial Sequence
  Synthetic construct
APELLGGPSVFLFPPKPKDTLMISRTPEVTCVVVDVSHEDPEVKFNWYVDGVEVHNAKTKPREEQYNSTYRVVSVLTVLHQDWLNGKEYKCKVSNKALPAPIEKTISKAKGQPREPQVYTLPPSRDELTKNQVSLWCLVKGFYPSDIAVEWESYGTEWVNYKTTPPVLDSDGSFFLYSKLTVTKEEWQQGFVFSCSVMHEALHNHYTQKSLSLSPGK

SEQ ID NO: 367 - protein, 217 aa, Artificial Sequence
  Synthetic construct
APEAAGGPSVFLFPPKPKDTLMISRTPEVTCVVVDVSHEDPEVKFNWYVDGVEVHNAKTKPREEQYNSTYRVVSVLTVLHQDWLNGKEYKCKVSNKALPAPIEKTISKAKGQPREPQVYTLPPSRDELTKNQVSLWCLVKGFYPSDIAVEWESYGTEWVNYKTTPPVLDSDGSFFLYSKLTVTKEEWQQGFVFSCSVMHEALHNHYTQKSLSLSPGK

SEQ ID NO: 368 - protein, 217 aa, Artificial Sequence
  Synthetic construct
APEAAGGPSVFLFPPKPKDTLMISRTPEVTCVVVDVSHEDPEVKFNWYVDGVEVHNAKTKPREEQYNSTYRVVSVLTVLHQDWLNGKEYKCKVSNKALGAPIEKTISKAKGQPREPQVYTLPPSRDELTKNQVSLWCLVKGFYPSDIAVEWESYGTEWVNYKTTPPVLDSDGSFFLYSKLTVTKEEWQQGFVFSCSVMHEALHNHYTQKSLSLSPGK

SEQ ID NO: 369 - protein, 217 aa, Artificial Sequence
  Synthetic construct
APELLGGPSVFLFPPKPKDTLYITREPEVTCVVVDVSHEDPEVKFNWYVDGVEVHNAKTKPREEQYNSTYRVVSVLTVLHQDWLNGKEYKCKVSNKALPAPIEKTISKAKGQPREPQVYTLPPSRDELTKNQVSLWCLVKGFYPSDIAVEWESYGTEWVNYKTTPPVLDSDGSFFLYSKLTVTKEEWQQGFVFSCSVMHEALHNHYTQKSLSLSPGK

SEQ ID NO: 370 - protein, 217 aa, Artificial Sequence
  Synthetic construct
APEAAGGPSVFLFPPKPKDTLYITREPEVTCVVVDVSHEDPEVKFNWYVDGVEVHNAKTKPREEQYNSTYRVVSVLTVLHQDWLNGKEYKCKVSNKALPAPIEKTISKAKGQPREPQVYTLPPSRDELTKNQVSLWCLVKGFYPSDIAVEWESYGTEWVNYKTTPPVLDSDGSFFLYSKLTVTKEEWQQGFVFSCSVMHEALHNHYTQKSLSLSPGK

SEQ ID NO: 371 - protein, 217 aa, Artificial Sequence
  Synthetic construct
APEAAGGPSVFLFPPKPKDTLYITREPEVTCVVVDVSHEDPEVKFNWYVDGVEVHNAKTKPREEQYNSTYRVVSVLTVLHQDWLNGKEYKCKVSNKALGAPIEKTISKAKGQPREPQVYTLPPSRDELTKNQVSLWCLVKGFYPSDIAVEWESYGTEWVNYKTTPPVLDSDGSFFLYSKLTVTKEEWQQGFVFSCSVMHEALHNHYTQKSLSLSPGK

SEQ ID NO: 372 - protein, 217 aa, Artificial Sequence
  Synthetic construct
APELLGGPSVFLFPPKPKDTLMISRTPEVTCVVVDVSHEDPEVKFNWYVDGVEVHNAKTKPREEQYNSTYRVVSVLTVLHQDWLNGKEYKCKVSNKALPAPIEKTISKAKGQPREPQVYTLPPSRDELTKNQVSLSCAVKGFYPSDIAVEWESYGTEWVNYKTTPPVLDSDGSFFLVSKLTVTKEEWQQGFVFSCSVMHEALHNHYTQKSLSLSPGK

SEQ ID NO: 373 - protein, 217 aa, Artificial Sequence
  Synthetic construct
APEAAGGPSVFLFPPKPKDTLMISRTPEVTCVVVDVSHEDPEVKFNWYVDGVEVHNAKTKPREEQYNSTYRVVSVLTVLHQDWLNGKEYKCKVSNKALPAPIEKTISKAKGQPREPQVYTLPPSRDELTKNQVSLSCAVKGFYPSDIAVEWESYGTEWVNYKTTPPVLDSDGSFFLVSKLTVTKEEWQQGFVFSCSVMHEALHNHYTQKSLSLSPGK

SEQ ID NO: 374 - protein, 217 aa, Artificial Sequence
  Synthetic construct
APEAAGGPSVFLFPPKPKDTLMISRTPEVTCVVVDVSHEDPEVKFNWYVDGVEVHNAKTKPREEQYNSTYRVVSVLTVLHQDWLNGKEYKCKVSNKALGAPIEKTISKAKGQPREPQVYTLPPSRDELTKNQVSLSCAVKGFYPSDIAVEWESYGTEWVNYKTTPPVLDSDGSFFLVSKLTVTKEEWQQGFVFSCSVMHEALHNHYTQKSLSLSPGK

SEQ ID NO: 375 - protein, 217 aa, Artificial Sequence
  Synthetic construct
APELLGGPSVFLFPPKPKDTLYITREPEVTCVVVDVSHEDPEVKFNWYVDGVEVHNAKTKPREEQYNSTYRVVSVLTVLHQDWLNGKEYKCKVSNKALPAPIEKTISKAKGQPREPQVYTLPPSRDELTKNQVSLSCAVKGFYPSDIAVEWESYGTEWVNYKTTPPVLDSDGSFFLVSKLTVTKEEWQQGFVFSCSVMHEALHNHYTQKSLSLSPGK

SEQ ID NO: 376 - protein, 217 aa, Artificial Sequence
  Synthetic construct
APEAAGGPSVFLFPPKPKDTLYITREPEVTCVVVDVSHEDPEVKFNWYVDGVEVHNAKTKPREEQYNSTYRVVSVLTVLHQDWLNGKEYKCKVSNKALPAPIEKTISKAKGQPREPQVYTLPPSRDELTKNQVSLSCAVKGFYPSDIAVEWESYGTEWVNYKTTPPVLDSDGSFFLVSKLTVTKEEWQQGFVFSCSVMHEALHNHYTQKSLSLSPGK

SEQ ID NO: 377 - protein, 217 aa, Artificial Sequence
  Synthetic construct
APEAAGGPSVFLFPPKPKDTLYITREPEVTCVVVDVSHEDPEVKFNWYVDGVEVHNAKTKPREEQYNSTYRVVSVLTVLHQDWLNGKEYKCKVSNKALGAPIEKTISKAKGQPREPQVYTLPPSRDELTKNQVSLSCAVKGFYPSDIAVEWESYGTEWVNYKTTPPVLDSDGSFFLVSKLTVTKEEWQQGFVFSCSVMHEALHNHYTQKSLSLSPGK

SEQ ID NO: 378 - protein, 217 aa, Artificial Sequence
  Synthetic construct
APELLGGPSVFLFPPKPKDTLMISRTPEVTCVVVDVSHEDPEVKFNWYVDGVEVHNAKTKPREEQYNSTYRVVSVLTVLHQDWLNGKEYKCKVSNKALPAPIEKTISKAKGQPREPQVYTLPPSRDELTKNQVSLWCLVKGFYPSDIAVEWESYGTEWSNYKTTPPVLDSDGSFFLYSKLTVSKEEWQQGFVFSCSVMHEALHNHYTQKSLSLSPGK

SEQ ID NO: 379 - protein, 217 aa, Artificial Sequence
  Synthetic construct
APEAAGGPSVFLFPPKPKDTLMISRTPEVTCVVVDVSHEDPEVKFNWYVDGVEVHNAKTKPREEQYNSTYRVVSVLTVLHQDWLNGKEYKCKVSNKALPAPIEKTISKAKGQPREPQVYTLPPSRDELTKNQVSLWCLVKGFYPSDIAVEWESYGTEWSNYKTTPPVLDSDGSFFLYSKLTVSKEEWQQGFVFSCSVMHEALHNHYTQKSLSLSPGK

SEQ ID NO: 380 - protein, 217 aa, Artificial Sequence
  Synthetic construct
APEAAGGPSVFLFPPKPKDTLMISRTPEVTCVVVDVSHEDPEVKFNWYVDGVEVHNAKTKPREEQYNSTYRVVSVLTVLHQDWLNGKEYKCKVSNKALGAPIEKTISKAKGQPREPQVYTLPPSRDELTKNQVSLWCLVKGFYPSDIAVEWESYGTEWSNYKTTPPVLDSDGSFFLYSKLTVSKEEWQQGFVFSCSVMHEALHNHYTQKSLSLSPGK

SEQ ID NO: 381 - protein, 217 aa, Artificial Sequence
  Synthetic construct
APELLGGPSVFLFPPKPKDTLYITREPEVTCVVVDVSHEDPEVKFNWYVDGVEVHNAKTKPREEQYNSTYRVVSVLTVLHQDWLNGKEYKCKVSNKALPAPIEKTISKAKGQPREPQVYTLPPSRDELTKNQVSLWCLVKGFYPSDIAVEWESYGTEWSNYKTTPPVLDSDGSFFLYSKLTVSKEEWQQGFVFSCSVMHEALHNHYTQKSLSLSPGK

SEQ ID NO: 382 - protein, 217 aa, Artificial Sequence
  Synthetic construct
APEAAGGPSVFLFPPKPKDTLYITREPEVTCVVVDVSHEDPEVKFNWYVDGVEVHNAKTKPREEQYNSTYRVVSVLTVLHQDWLNGKEYKCKVSNKALPAPIEKTISKAKGQPREPQVYTLPPSRDELTKNQVSLWCLVKGFYPSDIAVEWESYGTEWSNYKTTPPVLDSDGSFFLYSKLTVSKEEWQQGFVFSCSVMHEALHNHYTQKSLSLSPGK

SEQ ID NO: 383 - protein, 217 aa, Artificial Sequence
  Synthetic construct
APEAAGGPSVFLFPPKPKDTLYITREPEVTCVVVDVSHEDPEVKFNWYVDGVEVHNAKTKPREEQYNSTYRVVSVLTVLHQDWLNGKEYKCKVSNKALGAPIEKTISKAKGQPREPQVYTLPPSRDELTKNQVSLWCLVKGFYPSDIAVEWESYGTEWSNYKTTPPVLDSDGSFFLYSKLTVSKEEWQQGFVFSCSVMHEALHNHYTQKSLSLSPGK

SEQ ID NO: 384 - protein, 217 aa, Artificial Sequence
  Synthetic construct
APELLGGPSVFLFPPKPKDTLMISRTPEVTCVVVDVSHEDPEVKFNWYVDGVEVHNAKTKPREEQYNSTYRVVSVLTVLHQDWLNGKEYKCKVSNKALPAPIEKTISKAKGQPREPQVYTLPPSRDELTKNQVSLSCAVKGFYPSDIAVEWESYGTEWSNYKTTPPVLDSDGSFFLVSKLTVSKEEWQQGFVFSCSVMHEALHNHYTQKSLSLSPGK

SEQ ID NO: 385 - protein, 217 aa, Artificial Sequence
  Synthetic construct
APEAAGGPSVFLFPPKPKDTLMISRTPEVTCVVVDVSHEDPEVKFNWYVDGVEVHNAKTKPREEQYNSTYRVVSVLTVLHQDWLNGKEYKCKVSNKALPAPIEKTISKAKGQPREPQVYTLPPSRDELTKNQVSLSCAVKGFYPSDIAVEWESYGTEWSNYKTTPPVLDSDGSFFLVSKLTVSKEEWQQGFVFSCSVMHEALHNHYTQKSLSLSPGK

SEQ ID NO: 386 - protein, 217 aa, Artificial Sequence
  Synthetic construct
APEAAGGPSVFLFPPKPKDTLMISRTPEVTCVVVDVSHEDPEVKFNWYVDGVEVHNAKTKPREEQYNSTYRVVSVLTVLHQDWLNGKEYKCKVSNKALGAPIEKTISKAKGQPREPQVYTLPPSRDELTKNQVSLSCAVKGFYPSDIAVEWESYGTEWSNYKTTPPVLDSDGSFFLVSKLTVSKEEWQQGFVFSCSVMHEALHNHYTQKSLSLSPGK

SEQ ID NO: 387 - protein, 217 aa, Artificial Sequence
  Synthetic construct
APELLGGPSVFLFPPKPKDTLYITREPEVTCVVVDVSHEDPEVKFNWYVDGVEVHNAKTKPREEQYNSTYRVVSVLTVLHQDWLNGKEYKCKVSNKALPAPIEKTISKAKGQPREPQVYTLPPSRDELTKNQVSLSCAVKGFYPSDIAVEWESYGTEWSNYKTTPPVLDSDGSFFLVSKLTVSKEEWQQGFVFSCSVMHEALHNHYTQKSLSLSPGK

SEQ ID NO: 388 - protein, 217 aa, Artificial Sequence
  Synthetic construct
APEAAGGPSVFLFPPKPKDTLYITREPEVTCVVVDVSHEDPEVKFNWYVDGVEVHNAKTKPREEQYNSTYRVVSVLTVLHQDWLNGKEYKCKVSNKALPAPIEKTISKAKGQPREPQVYTLPPSRDELTKNQVSLSCAVKGFYPSDIAVEWESYGTEWSNYKTTPPVLDSDGSFFLVSKLTVSKEEWQQGFVFSCSVMHEALHNHYTQKSLSLSPGK

SEQ ID NO: 389 - protein, 217 aa, Artificial Sequence
  Synthetic construct
APEAAGGPSVFLFPPKPKDTLYITREPEVTCVVVDVSHEDPEVKFNWYVDGVEVHNAKTKPREEQYNSTYRVVSVLTVLHQDWLNGKEYKCKVSNKALGAPIEKTISKAKGQPREPQVYTLPPSRDELTKNQVSLSCAVKGFYPSDIAVEWESYGTEWSNYKTTPPVLDSDGSFFLVSKLTVSKEEWQQGFVFSCSVMHEALHNHYTQKSLSLSPGK

SEQ ID NO: 390 - protein, 217 aa, Artificial Sequence
  Synthetic construct
APELLGGPSVFLFPPKPKDTLMISRTPEVTCVVVDVSHEDPEVKFNWYVDGVEVHNAKTKPREEQYNSTYRVVSVLTVLHQDWLNGKEYKCKVSNKALPAPIEKTISKAKGQPREPQVYTLPPSRDELTKNQVSLWCLVKGFYPSDIAVLWESYGTEWASYKTTPPVLDSDGSFFLYSKLTVTKEEWQQGFVFSCSVMHEALHNHYTQKSLSLSPGK

SEQ ID NO: 391 - protein, 217 aa, Artificial Sequence
  Synthetic construct
APEAAGGPSVFLFPPKPKDTLMISRTPEVTCVVVDVSHEDPEVKFNWYVDGVEVHNAKTKPREEQYNSTYRVVSVLTVLHQDWLNGKEYKCKVSNKALPAPIEKTISKAKGQPREPQVYTLPPSRDELTKNQVSLWCLVKGFYPSDIAVLWESYGTEWASYKTTPPVLDSDGSFFLYSKLTVTKEEWQQGFVFSCSVMHEALHNHYTQKSLSLSPGK

SEQ ID NO: 392 - protein, 217 aa, Artificial Sequence
  Synthetic construct
APEAAGGPSVFLFPPKPKDTLMISRTPEVTCVVVDVSHEDPEVKFNWYVDGVEVHNAKTKPREEQYNSTYRVVSVLTVLHQDWLNGKEYKCKVSNKALGAPIEKTISKAKGQPREPQVYTLPPSRDELTKNQVSLWCLVKGFYPSDIAVLWESYGTEWASYKTTPPVLDSDGSFFLYSKLTVTKEEWQQGFVFSCSVMHEALHNHYTQKSLSLSPGK

SEQ ID NO: 393 - protein, 217 aa, Artificial Sequence
  Synthetic construct
APELLGGPSVFLFPPKPKDTLYITREPEVTCVVVDVSHEDPEVKFNWYVDGVEVHNAKTKPREEQYNSTYRVVSVLTVLHQDWLNGKEYKCKVSNKALPAPIEKTISKAKGQPREPQVYTLPPSRDELTKNQVSLWCLVKGFYPSDIAVLWESYGTEWASYKTTPPVLDSDGSFFLYSKLTVTKEEWQQGFVFSCSVMHEALHNHYTQKSLSLSPGK

SEQ ID NO: 394 - protein, 217 aa, Artificial Sequence
  Synthetic construct
APEAAGGPSVFLFPPKPKDTLYITREPEVTCVVVDVSHEDPEVKFNWYVDGVEVHNAKTKPREEQYNSTYRVVSVLTVLHQDWLNGKEYKCKVSNKALPAPIEKTISKAKGQPREPQVYTLPPSRDELTKNQVSLWCLVKGFYPSDIAVLWESYGTEWASYKTTPPVLDSDGSFFLYSKLTVTKEEWQQGFVFSCSVMHEALHNHYTQKSLSLSPGK

SEQ ID NO: 395 - protein, 217 aa, Artificial Sequence
  Synthetic construct
APEAAGGPSVFLFPPKPKDTLYITREPEVTCVVVDVSHEDPEVKFNWYVDGVEVHNAKTKPREEQYNSTYRVVSVLTVLHQDWLNGKEYKCKVSNKALGAPIEKTISKAKGQPREPQVYTLPPSRDELTKNQVSLWCLVKGFYPSDIAVLWESYGTEWASYKTTPPVLDSDGSFFLYSKLTVTKEEWQQGFVFSCSVMHEALHNHYTQKSLSLSPGK

SEQ ID NO: 396 - protein, 217 aa, Artificial Sequence
  Synthetic construct
APELLGGPSVFLFPPKPKDTLMISRTPEVTCVVVDVSHEDPEVKFNWYVDGVEVHNAKTKPREEQYNSTYRVVSVLTVLHQDWLNGKEYKCKVSNKALPAPIEKTISKAKGQPREPQVYTLPPSRDELTKNQVSLSCAVKGFYPSDIAVLWESYGTEWASYKTTPPVLDSDGSFFLVSKLTVTKEEWQQGFVFSCSVMHEALHNHYTQKSLSLSPGK

SEQ ID NO: 397 - protein, 217 aa, Artificial Sequence
  Synthetic construct
APEAAGGPSVFLFPPKPKDTLMISRTPEVTCVVVDVSHEDPEVKFNWYVDGVEVHNAKTKPREEQYNSTYRVVSVLTVLHQDWLNGKEYKCKVSNKALPAPIEKTISKAKGQPREPQVYTLPPSRDELTKNQVSLSCAVKGFYPSDIAVLWESYGTEWASYKTTPPVLDSDGSFFLVSKLTVTKEEWQQGFVFSCSVMHEALHNHYTQKSLSLSPGK

SEQ ID NO: 398 - protein, 217 aa, Artificial Sequence
  Synthetic construct
APEAAGGPSVFLFPPKPKDTLMISRTPEVTCVVVDVSHEDPEVKFNWYVDGVEVHNAKTKPREEQYNSTYRVVSVLTVLHQDWLNGKEYKCKVSNKALGAPIEKTISKAKGQPREPQVYTLPPSRDELTKNQVSLSCAVKGFYPSDIAVLWESYGTEWASYKTTPPVLDSDGSFFLVSKLTVTKEEWQQGFVFSCSVMHEALHNHYTQKSLSLSPGK

SEQ ID NO: 399 - protein, 217 aa, Artificial Sequence
  Synthetic construct
APELLGGPSVFLFPPKPKDTLYITREPEVTCVVVDVSHEDPEVKFNWYVDGVEVHNAKTKPREEQYNSTYRVVSVLTVLHQDWLNGKEYKCKVSNKALPAPIEKTISKAKGQPREPQVYTLPPSRDELTKNQVSLSCAVKGFYPSDIAVLWESYGTEWASYKTTPPVLDSDGSFFLVSKLTVTKEEWQQGFVFSCSVMHEALHNHYTQKSLSLSPGK

SEQ ID NO: 400 - protein, 217 aa, Artificial Sequence
  Synthetic construct
APEAAGGPSVFLFPPKPKDTLYITREPEVTCVVVDVSHEDPEVKFNWYVDGVEVHNAKTKPREEQYNSTYRVVSVLTVLHQDWLNGKEYKCKVSNKALPAPIEKTISKAKGQPREPQVYTLPPSRDELTKNQVSLSCAVKGFYPSDIAVLWESYGTEWASYKTTPPVLDSDGSFFLVSKLTVTKEEWQQGFVFSCSVMHEALHNHYTQKSLSLSPGK

SEQ ID NO: 401 - protein, 217 aa, Artificial Sequence
  Synthetic construct
APEAAGGPSVFLFPPKPKDTLYITREPEVTCVVVDVSHEDPEVKFNWYVDGVEVHNAKTKPREEQYNSTYRVVSVLTVLHQDWLNGKEYKCKVSNKALGAPIEKTISKAKGQPREPQVYTLPPSRDELTKNQVSLSCAVKGFYPSDIAVLWESYGTEWASYKTTPPVLDSDGSFFLVSKLTVTKEEWQQGFVFSCSVMHEALHNHYTQKSLSLSPGK

SEQ ID NO: 402 - protein, 217 aa, Artificial Sequence
  Synthetic construct
APELLGGPSVFLFPPKPKDTLMISRTPEVTCVVVDVSHEDPEVKFNWYVDGVEVHNAKTKPREEQYNSTYRVVSVLTVLHQDWLNGKEYKCKVSNKALPAPIEKTISKAKGQPREPQVYTLPPSRDELTKNQVSLWCLVKGFYPSDIAVEWESYGTEWSNYKTTPPVLDSDGSFFLYSKLTVTKEEWQQGFVFSCSVMHEALHNHYTQKSLSLSPGK

SEQ ID NO: 403 - protein, 217 aa, Artificial Sequence
  Synthetic construct
APEAAGGPSVFLFPPKPKDTLMISRTPEVTCVVVDVSHEDPEVKFNWYVDGVEVHNAKTKPREEQYNSTYRVVSVLTVLHQDWLNGKEYKCKVSNKALPAPIEKTISKAKGQPREPQVYTLPPSRDELTKNQVSLWCLVKGFYPSDIAVEWESYGTEWSNYKTTPPVLDSDGSFFLYSKLTVTKEEWQQGFVFSCSVMHEALHNHYTQKSLSLSPGK

SEQ ID NO: 404 - protein, 217 aa, Artificial Sequence
  Synthetic construct
APEAAGGPSVFLFPPKPKDTLMISRTPEVTCVVVDVSHEDPEVKFNWYVDGVEVHNAKTKPREEQYNSTYRVVSVLTVLHQDWLNGKEYKCKVSNKALGAPIEKTISKAKGQPREPQVYTLPPSRDELTKNQVSLWCLVKGFYPSDIAVEWESYGTEWSNYKTTPPVLDSDGSFFLYSKLTVTKEEWQQGFVFSCSVMHEALHNHYTQKSLSLSPGK

SEQ ID NO: 405 - protein, 217 aa, Artificial Sequence
  Synthetic construct
APELLGGPSVFLFPPKPKDTLYITREPEVTCVVVDVSHEDPEVKFNWYVDGVEVHNAKTKPREEQYNSTYRVVSVLTVLHQDWLNGKEYKCKVSNKALPAPIEKTISKAKGQPREPQVYTLPPSRDELTKNQVSLWCLVKGFYPSDIAVEWESYGTEWSNYKTTPPVLDSDGSFFLYSKLTVTKEEWQQGFVFSCSVMHEALHNHYTQKSLSLSPGK

SEQ ID NO: 406 - protein, 217 aa, Artificial Sequence
  Synthetic construct
APEAAGGPSVFLFPPKPKDTLYITREPEVTCVVVDVSHEDPEVKFNWYVDGVEVHNAKTKPREEQYNSTYRVVSVLTVLHQDWLNGKEYKCKVSNKALPAPIEKTISKAKGQPREPQVYTLPPSRDELTKNQVSLWCLVKGFYPSDIAVEWESYGTEWSNYKTTPPVLDSDGSFFLYSKLTVTKEEWQQGFVFSCSVMHEALHNHYTQKSLSLSPGK

SEQ ID NO: 407 - protein, 217 aa, Artificial Sequence
  Synthetic construct
APEAAGGPSVFLFPPKPKDTLYITREPEVTCVVVDVSHEDPEVKFNWYVDGVEVHNAKTKPREEQYNSTYRVVSVLTVLHQDWLNGKEYKCKVSNKALGAPIEKTISKAKGQPREPQVYTLPPSRDELTKNQVSLWCLVKGFYPSDIAVEWESYGTEWSNYKTTPPVLDSDGSFFLYSKLTVTKEEWQQGFVFSCSVMHEALHNHYTQKSLSLSPGK

SEQ ID NO: 408 - protein, 217 aa, Artificial Sequence
  Synthetic construct
APELLGGPSVFLFPPKPKDTLMISRTPEVTCVVVDVSHEDPEVKFNWYVDGVEVHNAKTKPREEQYNSTYRVVSVLTVLHQDWLNGKEYKCKVSNKALPAPIEKTISKAKGQPREPQVYTLPPSRDELTKNQVSLSCAVKGFYPSDIAVEWESYGTEWSNYKTTPPVLDSDGSFFLVSKLTVTKEEWQQGFVFSCSVMHEALHNHYTQKSLSLSPGK

SEQ ID NO: 409 - protein, 217 aa, Artificial Sequence
  Synthetic construct
APEAAGGPSVFLFPPKPKDTLMISRTPEVTCVVVDVSHEDPEVKFNWYVDGVEVHNAKTKPREEQYNSTYRVVSVLTVLHQDWLNGKEYKCKVSNKALPAPIEKTISKAKGQPREPQVYTLPPSRDELTKNQVSLSCAVKGFYPSDIAVEWESYGTEWSNYKTTPPVLDSDGSFFLVSKLTVTKEEWQQGFVFSCSVMHEALHNHYTQKSLSLSPGK

SEQ ID NO: 410 - protein, 217 aa, Artificial Sequence
  Synthetic construct
APEAAGGPSVFLFPPKPKDTLMISRTPEVTCVVVDVSHEDPEVKFNWYVDGVEVHNAKTKPREEQYNSTYRVVSVLTVLHQDWLNGKEYKCKVSNKALGAPIEKTISKAKGQPREPQVYTLPPSRDELTKNQVSLSCAVKGFYPSDIAVEWESYGTEWSNYKTTPPVLDSDGSFFLVSKLTVTKEEWQQGFVFSCSVMHEALHNHYTQKSLSLSPGK

SEQ ID NO: 411 - protein, 217 aa, Artificial Sequence
  Synthetic construct
APELLGGPSVFLFPPKPKDTLYITREPEVTCVVVDVSHEDPEVKFNWYVDGVEVHNAKTKPREEQYNSTYRVVSVLTVLHQDWLNGKEYKCKVSNKALPAPIEKTISKAKGQPREPQVYTLPPSRDELTKNQVSLSCAVKGFYPSDIAVEWESYGTEWSNYKTTPPVLDSDGSFFLVSKLTVTKEEWQQGFVFSCSVMHEALHNHYTQKSLSLSPGK

SEQ ID NO: 412 - protein, 217 aa, Artificial Sequence
  Synthetic construct
APEAAGGPSVFLFPPKPKDTLYITREPEVTCVVVDVSHEDPEVKFNWYVDGVEVHNAKTKPREEQYNSTYRVVSVLTVLHQDWLNGKEYKCKVSNKALPAPIEKTISKAKGQPREPQVYTLPPSRDELTKNQVSLSCAVKGFYPSDIAVEWESYGTEWSNYKTTPPVLDSDGSFFLVSKLTVTKEEWQQGFVFSCSVMHEALHNHYTQKSLSLSPGK

SEQ ID NO: 413 - protein, 217 aa, Artificial Sequence
  Synthetic construct
APEAAGGPSVFLFPPKPKDTLYITREPEVTCVVVDVSHEDPEVKFNWYVDGVEVHNAKTKPREEQYNSTYRVVSVLTVLHQDWLNGKEYKCKVSNKALGAPIEKTISKAKGQPREPQVYTLPPSRDELTKNQVSLSCAVKGFYPSDIAVEWESYGTEWSNYKTTPPVLDSDGSFFLVSKLTVTKEEWQQGFVFSCSVMHEALHNHYTQKSLSLSPGK

SEQ ID NO: 414 - protein, 443 aa, Artificial Sequence
  Synthetic construct
EVKLVESGGGLVKPGGSLKLSCAASGFTFSSYGMSWVRQTPEKRLEWVASISGDGGSYIHYADSVKGRFTISRDSAKNTLYLQMSSLRSEDTALYYCARLPYWGQGTLVTVSAASTKGPSVFPLAPSSKSTSGGTAALGCLVKDYFPEPVTVSWNSGALTSGVHTFPAVLQSSGLYSLSSVVTVPSSSLGTQTYICNVNHKPSNTKVDKKVEPKSCDKTHTCPPCPAPELLGGPSVFLFPPKPKDTLMISRTPEVTCVVVDVSHEDPEVKFNWYVDGVEVHNAKTKPREEQYNSTYRVVSVLTVLHQDWLNGKEYKCKVSNKALPAPIEKTISKAKGQPREPQVYTLPPSRDELTKNQVSLTCLVKGFYPSDIAVEWESFGTEWSSYKTTPPVLDSDGSFFLYSKLTVTKEEWQQGFVFSCSVMHEALHNHYTQKSLSLSPGK

SEQ ID NO: 415 - protein, 443 aa, Artificial Sequence
  Synthetic construct
EVKLVESGGGLVKPGGSLKLSCAASGFTFSSYGMSWVRQTPEKRLEWVASISGDGGSYIHYADSVKGRFTISRDSAKNTLYLQMSSLRSEDTALYYCARLPYWGQGTLVTVSAASTKGPSVFPLAPSSKSTSGGTAALGCLVKDYFPEPVTVSWNSGALTSGVHTFPAVLQSSGLYSLSSVVTVPSSSLGTQTYICNVNHKPSNTKVDKKVEPKSCDKTHTCPPCPAPELLGGPSVFLFPPKPKDTLMISRTPEVTCVVVDVSHEDPEVKFNWYVDGVEVHNAKTKPREEQYNSTYRVVSVLTVLHQDWLNGKEYKCKVSNKALPAPIEKTISKAKGQPREPQVYTLPPSRDELTKNQVSLTCLVKGFYPSDIAVEWESYGTEWANYKTTPPVLDSDGSFFLYSKLTVTKEEWQQGFVFSCSVMHEALHNHYTQKSLSLSPGK

SEQ ID NO: 416 - protein, 443 aa, Artificial Sequence
  Synthetic construct
EVKLVESGGGLVKPGGSLKLSCAASGFTFSSYGMSWVRQTPEKRLEWVASISGDGGSYIHYADSVKGRFTISRDSAKNTLYLQMSSLRSEDTALYYCARLPYWGQGTLVTVSAASTKGPSVFPLAPSSKSTSGGTAALGCLVKDYFPEPVTVSWNSGALTSGVHTFPAVLQSSGLYSLSSVVTVPSSSLGTQTYICNVNHKPSNTKVDKKVEPKSCDKTHTCPPCPAPELLGGPSVFLFPPKPKDTLMISRTPEVTCVVVDVSHEDPEVKFNWYVDGVEVHNAKTKPREEQYNSTYRVVSVLTVLHQDWLNGKEYKCKVSNKALPAPIEKTISKAKGQPREPQVYTLPPSRDELTKNQVSLTCLVKGFYPSDIAVEWESYGTEWVNYKTTPPVLDSDGSFFLYSKLTVTKEEWQQGFVFSCSVMHEALHNHYTQKSLSLSPGK

SEQ ID NO: 417 - protein, 443 aa, Artificial Sequence
  Synthetic construct
EVKLVESGGGLVKPGGSLKLSCAASGFTFSSYGMSWVRQTPEKRLEWVASISGDGGSYIHYADSVKGRFTISRDSAKNTLYLQMSSLRSEDTALYYCARLPYWGQGTLVTVSAASTKGPSVFPLAPSSKSTSGGTAALGCLVKDYFPEPVTVSWNSGALTSGVHTFPAVLQSSGLYSLSSVVTVPSSSLGTQTYICNVNHKPSNTKVDKKVEPKSCDKTHTCPPCPAPELLGGPSVFLFPPKPKDTLMISRTPEVTCVVVDVSHEDPEVKFNWYVDGVEVHNAKTKPREEQYNSTYRVVSVLTVLHQDWLNGKEYKCKVSNKALPAPIEKTISKAKGQPREPQVYTLPPSRDELTKNQVSLTCLVKGFYPSDIAVEWESYGTEWSNYKTTPPVLDSDGSFFLYSKLTVSKEEWQQGFVFSCSVMHEALHNHYTQKSLSLSPGK

SEQ ID NO: 418 - protein, 443 aa, Artificial Sequence
  Synthetic construct
EVKLVESGGGLVKPGGSLKLSCAASGFTFSSYGMSWVRQTPEKRLEWVASISGDGGSYIHYADSVKGRFTISRDSAKNTLYLQMSSLRSEDTALYYCARLPYWGQGTLVTVSAASTKGPSVFPLAPSSKSTSGGTAALGCLVKDYFPEPVTVSWNSGALTSGVHTFPAVLQSSGLYSLSSVVTVPSSSLGTQTYICNVNHKPSNTKVDKKVEPKSCDKTHTCPPCPAPELLGGPSVFLFPPKPKDTLMISRTPEVTCVVVDVSHEDPEVKFNWYVDGVEVHNAKTKPREEQYNSTYRVVSVLTVLHQDWLNGKEYKCKVSNKALPAPIEKTISKAKGQPREPQVYTLPPSRDELTKNQVSLTCLVKGFYPSDIAVLWESYGTEWASYKTTPPVLDSDGSFFLYSKLTVTKEEWQQGFVFSCSVMHEALHNHYTQKSLSLSPGK

SEQ ID NO: 419 - protein, 443 aa, Artificial Sequence
  Synthetic construct
EVKLVESGGGLVKPGGSLKLSCAASGFTFSSYGMSWVRQTPEKRLEWVASISGDGGSYIHYADSVKGRFTISRDSAKNTLYLQMSSLRSEDTALYYCARLPYWGQGTLVTVSAASTKGPSVFPLAPSSKSTSGGTAALGCLVKDYFPEPVTVSWNSGALTSGVHTFPAVLQSSGLYSLSSVVTVPSSSLGTQTYICNVNHKPSNTKVDKKVEPKSCDKTHTCPPCPAPELLGGPSVFLFPPKPKDTLMISRTPEVTCVVVDVSHEDPEVKFNWYVDGVEVHNAKTKPREEQYNSTYRVVSVLTVLHQDWLNGKEYKCKVSNKALPAPIEKTISKAKGQPREPQVYTLPPSRDELTKNQVSLTCLVKGFYPSDIAVEWESYGTEWSNYKTTPPVLDSDGSFFLYSKLTVTKEEWQQGFVFSCSVMHEALHNHYTQKSLSLSPGK

SEQ ID NO: 420 - protein, 10 aa, Artificial Sequence
  Synthetic construct
GFTFSRVGVS

SEQ ID NO: 421 - protein, 10 aa, Artificial Sequence
  Synthetic construct
GFKFSSVGVS

SEQ ID NO: 422 - protein, 10 aa, Artificial Sequence
  Synthetic construct
GFKFSQVGVS

SEQ ID NO: 423 - protein, 10 aa, Artificial Sequence
  Synthetic construct
GFKFSMVGVS

SEQ ID NO: 424 - protein, 10 aa, Artificial Sequence
  Synthetic construct
GFKFSRYGVS

SEQ ID NO: 425 - protein, 10 aa, Artificial Sequence
  Synthetic construct
GFKFSRVGMS

SEQ ID NO: 426 - protein, 10 aa, Artificial Sequence
  Synthetic construct
GFTFSSVGTS

SEQ ID NO: 427 - protein, 10 aa, Artificial Sequence
  Synthetic construct
GFTFSMVGTS

SEQ ID NO: 428 - protein, 10 aa, Artificial Sequence
  Synthetic construct
GFTFSQVGTS

SEQ ID NO: 429 - protein, 10 aa, Artificial Sequence
  Synthetic construct
GFTFSLVGTS

SEQ ID NO: 430 - protein, 10 aa, Artificial Sequence
  Synthetic construct
GFTFSKVGTS

SEQ ID NO: 431 - protein, 10 aa, Artificial Sequence
  Synthetic construct
GFTFSRYGTS

SEQ ID NO: 432 - protein, 10 aa, Artificial Sequence
  Synthetic construct
GFTFSRVGMS

SEQ ID NO: 433 - protein, 10 aa, Artificial Sequence
  Synthetic construct
GFTFSGPGMS

SEQ ID NO: 434 - protein, 10 aa, Artificial Sequence
  Synthetic construct
GFQFSGPGMS

SEQ ID NO: 435 - protein, 10 aa, Artificial Sequence
  Synthetic construct
GFMFSGPGMS

SEQ ID NO: 436 - protein, 10 aa, Artificial Sequence
  Synthetic construct
GFRFSSPGMS

SEQ ID NO: 437 - protein, 10 aa, Artificial Sequence
  Synthetic construct
GFRFSGYGMS

SEQ ID NO: 438 - protein, 17 aa, Artificial Sequence
  Synthetic construct
SISGEGGSYIHYADSVK

SEQ ID NO: 439 - protein, 17 aa, Artificial Sequence
  Synthetic construct
SISGTGGSYIHYADSVK

SEQ ID NO: 440 - protein, 17 aa, Artificial Sequence
  Synthetic construct
SISGSGGSYIHYADSVK

SEQ ID NO: 441 - protein, 17 aa, Artificial Sequence
  Synthetic construct
SISGDAGSYIHYADSVK

SEQ ID NO: 442 - protein, 17 aa, Artificial Sequence
  Synthetic construct
SISGDGGSYIHYASSVK

SEQ ID NO: 443 - protein, 17 aa, Artificial Sequence
  Synthetic construct
SISGDGGSYIHYADAVK

SEQ ID NO: 444 - protein, 17 aa, Artificial Sequence
  Synthetic construct
KSSQSLLYSGNQKNYLT

SEQ ID NO: 445 - protein, 17 aa, Artificial Sequence
  Synthetic construct
KSSQSLLSSGNQKNYLT

SEQ ID NO: 446 - protein, 17 aa, Artificial Sequence
  Synthetic construct
KSSQSLLQSGNQKNYLT

SEQ ID NO: 447 - protein, 17 aa, Artificial Sequence
  Synthetic construct
KSSQSLLNAGNQKNYLT

SEQ ID NO: 448 - protein, 17 aa, Artificial Sequence
  Synthetic construct
KSSQSLVRSGTQKDYLV

SEQ ID NO: 449 - protein, 17 aa, Artificial Sequence
  Synthetic construct
KSSQSLLRSGTQKDYLV

SEQ ID NO: 450 - protein, 17 aa, Artificial Sequence
  Synthetic construct
KSSQSLHYSGTQKDYLV

SEQ ID NO: 451 - protein, 17 aa, Artificial Sequence
  Synthetic construct
KSSQSLHNSGTQKDYLV

SEQ ID NO: 452 - protein, 17 aa, Artificial Sequence
  Synthetic construct
KSSQSLHMSGTQKDYLV

SEQ ID NO: 453 - protein, 17 aa, Artificial Sequence
  Synthetic construct
KSSQSLHQSGTQKDYLV

SEQ ID NO: 454 - protein, 17 aa, Artificial Sequence
  Synthetic construct
KSSQSLHKSGTQKDYLV

SEQ ID NO: 455 - protein, 17 aa, Artificial Sequence
  Synthetic construct
KSSQSLHLSGTQKDYLV

SEQ ID NO: 456 - protein, 17 aa, Artificial Sequence
  Synthetic construct
KSSQSLHRSGNQKDYLV

SEQ ID NO: 457 - protein, 17 aa, Artificial Sequence
  Synthetic construct
KSSQSLHRSGTQKNYLV

SEQ ID NO: 458 - protein, 17 aa, Artificial Sequence
  Synthetic construct
KSSQSLHRSGTQKDYLA

SEQ ID NO: 459 - protein, 17 aa, Artificial Sequence
  Synthetic construct
KSSQSLLYSGNQKDYLV

SEQ ID NO: 460 - protein, 9 aa, Artificial Sequence
  Synthetic construct
QQYYSYPLT

SEQ ID NO: 461 - protein, 9 aa, Artificial Sequence
  Synthetic construct
QQYSSYPLT

SEQ ID NO: 462 - protein, 9 aa, Artificial Sequence
  Synthetic construct
QQYNAYPLT

SEQ ID NO: 463 - protein, 113 aa, Artificial Sequence
  Synthetic construct
DIVMTQSPDSLAVSLGERATINCKSSQSLHYSGTQKDYLVWYQQKPGQPPKLLIYWASTRESGVPDRFSGSGSGTDFTLTISSLQAEDVAVYYCQQYSSYPLTFGQGTKVEIK

SEQ ID NO: 464 - protein, 113 aa, Artificial Sequence
  Synthetic construct
DIVMTQSPDSLAVSLGERATINCKSSQSLLYSGNQKDYLVWYQQKPGQPPKLLIYWASTRESGVPDRFSGSGSGTDFTLTISSLQAEDVAVYYCQQYSSYPLTFGQGTKVEIK

SEQ ID NO: 465 - protein, 10 aa, Artificial Sequence
  Synthetic construct
  MISC_FEATURE (3)..(3): Xaa = Thr, Lys, Arg, Gln, or Met
  MISC_FEATURE (6)..(6): Xaa = Ser, Arg, Gln, Met, Leu, Lys, Gly, or Ser
  MISC_FEATURE (7)..(7): Xaa = Tyr, Val, or Pro
  MISC_FEATURE (9)..(9): Xaa = Met, Val, or Thr
GFXFSXXGXS

SEQ ID NO: 466 - protein, 17 aa, Artificial Sequence
  Synthetic construct
  MISC_FEATURE (5)..(5): Xaa = Asp, Glu, Thr, or Ser
  MISC_FEATURE (6)..(6): Xaa = Gly or Ala
  MISC_FEATURE (14)..(14): Xaa = Asp or Ser
  MISC_FEATURE (15)..(15): Xaa = Ser or Ala
SISGXXGSYIHYAXXVK

SEQ ID NO: 467 - protein, 17 aa, Artificial Sequence
  Synthetic construct
  MISC_FEATURE (7)..(7): Xaa = Leu, His, or Val
  MISC_FEATURE (8)..(8): Xaa = Asn, Tyr, Ser, Gln, Arg, Met, Lys, or Leu
  MISC_FEATURE (9)..(9): Xaa = Ser or Ala
  MISC_FEATURE (11)..(11): Xaa = Thr or Asn
  MISC_FEATURE (14)..(14): Xaa = Asn or Asp
  MISC_FEATURE (17)..(17): Xaa = Thr, Val, or Ala
KSSQSLXXXGXQKXYLX

SEQ ID NO: 468 - protein, 9 aa, Artificial Sequence
  Synthetic construct
  MISC_FEATURE (4)..(4): Xaa = Asn, Tyr, or Ser
  MISC_FEATURE (5)..(5): Xaa = Ser or Ala
QQYXXYPLT

SEQ ID NO: 469 - protein, 217 aa, Artificial Sequence
  Synthetic construct
APELLGGPSVFLFPPKPKDTLMISRTPEVTCVVVDVSHEDPEVKFNWYVDGVEVHNAKTKPREEQYNSTYRVVSVLTVLHQDWLNGKEYKCKVSNKALPAPIEKTISKAKGQPREPQVYTLPPSRDELTKNQVSLTCLVKGFYPSDIAVEWESFGTEWSSYKTTPPVLDSDGSFFLYSKLTVSKEEWQQGFVFSCSVMHEALHNHYTQKSLSLSPGK

SEQ ID NO: 470 - protein, 217 aa, Artificial Sequence
  Synthetic construct
APELLGGPSVFLFPPKPKDTLMISRTPEVTCVVVDVSHEDPEVKFNWYVDGVEVHNAKTKPREEQYNSTYRVVSVLTVLHQDWLNGKEYKCKVSNKALPAPIEKTISKAKGQPREPQVYTLPPSRDELTKNQVSLTCLVKGFYPSDIAVEWESYGTEWANYKTTPPVLDSDGSFFLYSKLTVSKSEWQQGFVFSCSVMHEALHNHYTQKSLSLSPGK

SEQ ID NO: 471 - protein, 217 aa, Artificial Sequence
  Synthetic construct
APELLGGPSVFLFPPKPKDTLMISRTPEVTCVVVDVSHEDPEVKFNWYVDGVEVHNAKTKPREEQYNSTYRVVSVLTVLHQDWLNGKEYKCKVSNKALPAPIEKTISKAKGQPREPQVYTLPPSRDELTKNQVSLTCLVKGFYPSDIAVEWESFGTEWSNYKTTPPVLDSDGSFFLYSKLTVSKEEWQQGFVFSCSVMHEALHNHYTQKSLSLSPGK

SEQ ID NO: 472 - protein, 217 aa, Artificial Sequence
  Synthetic construct
APELLGGPSVFLFPPKPKDTLMISRTPEVTCVVVDVSHEDPEVKFNWYVDGVEVHNAKTKPREEQYNSTYRVVSVLTVLHQDWLNGKEYKCKVSNKALPAPIEKTISKAKGQPREPQVYTLPPSRDELTKNQVSLTCLVKGFYPSDIAVEWESYGTEWSSYKTTPPVLDSDGSFFLYSKLTVSKSEWQQGFVFSCSVMHEALHNHYTQKSLSLSPGK

SEQ ID NO: 473 - protein, 217 aa, Artificial Sequence
  Synthetic construct
APELLGGPSVFLFPPKPKDTLMISRTPEVTCVVVDVSHEDPEVKFNWYVDGVEVHNAKTKPREEQYNSTYRVVSVLTVLHQDWLNGKEYKCKVSNKALPAPIEKTISKAKGQPREPQVYTLPPSRDELTKNQVSLTCLVKGFYPSDIAVEWESYGTEWVNYKTTPPVLDSDGSFFLYSKLTVSKEEWQQGFVFSCSVMHEALHNHYTQKSLSLSPGK

SEQ ID NO: 474 - protein, 217 aa, Artificial Sequence; identical to SEQ ID NO: 194
  Synthetic construct

SEQ ID NO: 475 - protein, 217 aa, Artificial Sequence
  Synthetic construct
APELLGGPSVFLFPPKPKDTLMISRTPEVTCVVVDVSHEDPEVKFNWYVDGVEVHNAKTKPREEQYNSTYRVVSVLTVLHQDWLNGKEYKCKVSNKALPAPIEKTISKAKGQPREPQVYTLPPSRDELTKNQVSLTCLVKGFYPSDIAVEWESFGTEWVNYKTTPPVLDSDGSFFLYSKLTVSKEEWQQGFVFSCSVMHEALHNHYTQKSLSLSPGK

SEQ ID NO: 476 - protein, 217 aa, Artificial Sequence
  Synthetic construct
APEAAGGPSVFLFPPKPKDTLMISRTPEVTCVVVDVSHEDPEVKFNWYVDGVEVHNAKTKPREEQYNSTYRVVSVLTVLHQDWLNGKEYKCKVSNKALGAPIEKTISKAKGQPREPQVYTLPPSRDELTKNQVSLWCLVKGFYPSDIAVWWESYGTEWSSYKTTPPVLDSDGSFFLYSKLTVTKEEWQQGFVFSCSVMHEALHNHYTQKSLSLSPGK

SEQ ID NO: 477 - protein, 217 aa, Artificial Sequence
  Synthetic construct
APEAAGGPSVFLFPPKPKDTLYITREPEVTCVVVDVSHEDPEVKFNWYVDGVEVHNAKTKPREEQYNSTYRVVSVLTVLHQDWLNGKEYKCKVSNKALGAPIEKTISKAKGQPREPQVYTLPPSRDELTKNQVSLWCLVKGFYPSDIAVWWESYGTEWSSYKTTPPVLDSDGSFFLYSKLTVTKEEWQQGFVFSCSVMHEALHNHYTQKSLSLSPGK

SEQ ID NO: 478 - protein, 217 aa, Artificial Sequence
  Synthetic construct
APEAAGGPSVFLFPPKPKDTLMISRTPEVTCVVVDVSHEDPEVKFNWYVDGVEVHNAKTKPREEQYNSTYRVVSVLTVLHQDWLNGKEYKCKVSNKALGAPIEKTISKAKGQPREPQVYTLPPSRDELTKNQVSLSCAVKGFYPSDIAVWWESYGTEWSSYKTTPPVLDSDGSFFLVSKLTVTKEEWQQGFVFSCSVMHEALHNHYTQKSLSLSPGK

SEQ ID NO: 479 - protein, 217 aa, Artificial Sequence
  Synthetic construct
APEAAGGPSVFLFPPKPKDTLYITREPEVTCVVVDVSHEDPEVKFNWYVDGVEVHNAKTKPREEQYNSTYRVVSVLTVLHQDWLNGKEYKCKVSNKALGAPIEKTISKAKGQPREPQVYTLPPSRDELTKNQVSLSCAVKGFYPSDIAVWWESYGTEWSSYKTTPPVLDSDGSFFLVSKLTVTKEEWQQGFVFSCSVMHEALHNHYTQKSLSLSPGK

SEQ ID NO: 480 - protein, 217 aa, Artificial Sequence
  Synthetic construct
APELLGGPSVFLFPPKPKDTLMISRTPEVTCVVVDVSHEDPEVKFNWYVDGVEVHNAKTKPREEQYNSTYRVVSVLTVLHQDWLNGKEYKCKVSNKALPAPIEKTISKAKGQPREPQVYTLPPSRDELTKNQVSLWCLVKGFYPSDIAVEWESFGTEWSSYKTTPPVLDSDGSFFLYSKLTVSKEEWQQGFVFSCSVMHEALHNHYTQKSLSLSPGK

SEQ ID NO: 481 - protein, 217 aa, Artificial Sequence
  Synthetic construct
APEAAGGPSVFLFPPKPKDTLMISRTPEVTCVVVDVSHEDPEVKFNWYVDGVEVHNAKTKPREEQYNSTYRVVSVLTVLHQDWLNGKEYKCKVSNKALPAPIEKTISKAKGQPREPQVYTLPPSRDELTKNQVSLWCLVKGFYPSDIAVEWESFGTEWSSYKTTPPVLDSDGSFFLYSKLTVSKEEWQQGFVFSCSVMHEALHNHYTQKSLSLSPGK

SEQ ID NO: 482 - protein, 217 aa, Artificial Sequence
  Synthetic construct
APEAAGGPSVFLFPPKPKDTLMISRTPEVTCVVVDVSHEDPEVKFNWYVDGVEVHNAKTKPREEQYNSTYRVVSVLTVLHQDWLNGKEYKCKVSNKALGAPIEKTISKAKGQPREPQVYTLPPSRDELTKNQVSLWCLVKGFYPSDIAVEWESFGTEWSSYKTTPPVLDSDGSFFLYSKLTVSKEEWQQGFVFSCSVMHEALHNHYTQKSLSLSPGK

SEQ ID NO: 483 - protein, 217 aa, Artificial Sequence
  Synthetic construct
APELLGGPSVFLFPPKPKDTLYITREPEVTCVVVDVSHEDPEVKFNWYVDGVEVHNAKTKPREEQYNSTYRVVSVLTVLHQDWLNGKEYKCKVSNKALPAPIEKTISKAKGQPREPQVYTLPPSRDELTKNQVSLWCLVKGFYPSDIAVEWESFGTEWSSYKTTPPVLDSDGSFFLYSKLTVSKEEWQQGFVFSCSVMHEALHNHYTQKSLSLSPGK

SEQ ID NO: 484 - protein, 217 aa, Artificial Sequence
  Synthetic construct
APEAAGGPSVFLFPPKPKDTLYITREPEVTCVVVDVSHEDPEVKFNWYVDGVEVHNAKTKPREEQYNSTYRVVSVLTVLHQDWLNGKEYKCKVSNKALPAPIEKTISKAKGQPREPQVYTLPPSRDELTKNQVSLWCLVKGFYPSDIAVEWESFGTEWSSYKTTPPVLDSDGSFFLYSKLTVSKEEWQQGFVFSCSVMHEALHNHYTQKSLSLSPGK

SEQ ID NO: 485 - protein, 217 aa, Artificial Sequence
  Synthetic construct
APEAAGGPSVFLFPPKPKDTLYITREPEVTCVVVDVSHEDPEVKFNWYVDGVEVHNAKTKPREEQYNSTYRVVSVLTVLHQDWLNGKEYKCKVSNKALGAPIEKTISKAKGQPREPQVYTLPPSRDELTKNQVSLWCLVKGFYPSDIAVEWESFGTEWSSYKTTPPVLDSDGSFFLYSKLTVSKEEWQQGFVFSCSVMHEALHNHYTQKSLSLSPGK

SEQ ID NO: 486 - protein, 217 aa, Artificial Sequence
  Synthetic construct
APELLGGPSVFLFPPKPKDTLMISRTPEVTCVVVDVSHEDPEVKFNWYVDGVEVHNAKTKPREEQYNSTYRVVSVLTVLHQDWLNGKEYKCKVSNKALPAPIEKTISKAKGQPREPQVYTLPPSRDELTKNQVSLSCAVKGFYPSDIAVEWESFGTEWSSYKTTPPVLDSDGSFFLVSKLTVSKEEWQQGFVFSCSVMHEALHNHYTQKSLSLSPGK

SEQ ID NO: 487 - protein, 217 aa, Artificial Sequence
  Synthetic construct
APEAAGGPSVFLFPPKPKDTLMISRTPEVTCVVVDVSHEDPEVKFNWYVDGVEVHNAKTKPREEQYNSTYRVVSVLTVLHQDWLNGKEYKCKVSNKALPAPIEKTISKAKGQPREPQVYTLPPSRDELTKNQVSLSCAVKGFYPSDIAVEWESFGTEWSSYKTTPPVLDSDGSFFLVSKLTVSKEEWQQGFVFSCSVMHEALHNHYTQKSLSLSPGK

SEQ ID NO: 488 - protein, 217 aa, Artificial Sequence
  Synthetic construct
APEAAGGPSVFLFPPKPKDTLMISRTPEVTCVVVDVSHEDPEVKFNWYVDGVEVHNAKTKPREEQYNSTYRVVSVLTVLHQDWLNGKEYKCKVSNKALGAPIEKTISKAKGQPREPQVYTLPPSRDELTKNQVSLSCAVKGFYPSDIAVEWESFGTEWSSYKTTPPVLDSDGSFFLVSKLTVSKEEWQQGFVFSCSVMHEALHNHYTQKSLSLSPGK

SEQ ID NO: 489 - protein, 217 aa, Artificial Sequence
  Synthetic construct
APELLGGPSVFLFPPKPKDTLYITREPEVTCVVVDVSHEDPEVKFNWYVDGVEVHNAKTKPREEQYNSTYRVVSVLTVLHQDWLNGKEYKCKVSNKALPAPIEKTISKAKGQPREPQVYTLPPSRDELTKNQVSLSCAVKGFYPSDIAVEWESFGTEWSSYKTTPPVLDSDGSFFLVSKLTVSKEEWQQGFVFSCSVMHEALHNHYTQKSLSLSPGK

SEQ ID NO: 490 - protein, 217 aa, Artificial Sequence
  Synthetic construct
APEAAGGPSVFLFPPKPKDTLYITREPEVTCVVVDVSHEDPEVKFNWYVDGVEVHNAKTKPREEQYNSTYRVVSVLTVLHQDWLNGKEYKCKVSNKALPAPIEKTISKAKGQPREPQVYTLPPSRDELTKNQVSLSCAVKGFYPSDIAVEWESFGTEWSSYKTTPPVLDSDGSFFLVSKLTVSKEEWQQGFVFSCSVMHEALHNHYTQKSLSLSPGK

SEQ ID NO: 491 - protein, 217 aa, Artificial Sequence
  Synthetic construct
APEAAGGPSVFLFPPKPKDTLYITREPEVTCVVVDVSHEDPEVKFNWYVDGVEVHNAKTKPREEQYNSTYRVVSVLTVLHQDWLNGKEYKCKVSNKALGAPIEKTISKAKGQPREPQVYTLPPSRDELTKNQVSLSCAVKGFYPSDIAVEWESFGTEWSSYKTTPPVLDSDGSFFLVSKLTVSKEEWQQGFVFSCSVMHEALHNHYTQKSLSLSPGK

SEQ ID NO: 492 - protein, 217 aa, Artificial Sequence
  Synthetic construct
APELLGGPSVFLFPPKPKDTLMISRTPEVTCVVVDVSHEDPEVKFNWYVDGVEVHNAKTKPREEQYNSTYRVVSVLTVLHQDWLNGKEYKCKVSNKALPAPIEKTISKAKGQPREPQVYTLPPSRDELTKNQVSLWCLVKGFYPSDIAVEWESYGTEWANYKTTPPVLDSDGSFFLYSKLTVSKSEWQQGFVFSCSVMHEALHNHYTQKSLSLSPGK

SEQ ID NO: 493 - protein, 217 aa, Artificial Sequence
  Synthetic construct
APEAAGGPSVFLFPPKPKDTLMISRTPEVTCVVVDVSHEDPEVKFNWYVDGVEVHNAKTKPREEQYNSTYRVVSVLTVLHQDWLNGKEYKCKVSNKALPAPIEKTISKAKGQPREPQVYTLPPSRDELTKNQVSLWCLVKGFYPSDIAVEWESYGTEWANYKTTPPVLDSDGSFFLYSKLTVSKSEWQQGFVFSCSVMHEALHNHYTQKSLSLSPGK

SEQ ID NO: 494 - protein, 217 aa, Artificial Sequence
  Synthetic construct
APEAAGGPSVFLFPPKPKDTLMISRTPEVTCVVVDVSHEDPEVKFNWYVDGVEVHNAKTKPREEQYNSTYRVVSVLTVLHQDWLNGKEYKCKVSNKALGAPIEKTISKAKGQPREPQVYTLPPSRDELTKNQVSLWCLVKGFYPSDIAVEWESYGTEWANYKTTPPVLDSDGSFFLYSKLTVSKSEWQQGFVFSCSVMHEALHNHYTQKSLSLSPGK

SEQ ID NO: 495 - protein, 217 aa, Artificial Sequence
  Synthetic construct
APELLGGPSVFLFPPKPKDTLYITREPEVTCVVVDVSHEDPEVKFNWYVDGVEVHNAKTKPREEQYNSTYRVVSVLTVLHQDWLNGKEYKCKVSNKALPAPIEKTISKAKGQPREPQVYTLPPSRDELTKNQVSLWCLVKGFYPSDIAVEWESYGTEWANYKTTPPVLDSDGSFFLYSKLTVSKSEWQQGFVFSCSVMHEALHNHYTQKSLSLSPGK

SEQ ID NO: 496 - protein, 217 aa, Artificial Sequence
  Synthetic construct
APEAAGGPSVFLFPPKPKDTLYITREPEVTCVVVDVSHEDPEVKFNWYVDGVEVHNAKTKPREEQYNSTYRVVSVLTVLHQDWLNGKEYKCKVSNKALPAPIEKTISKAKGQPREPQVYTLPPSRDELTKNQVSLWCLVKGFYPSDIAVEWESYGTEWANYKTTPPVLDSDGSFFLYSKLTVSKSEWQQGFVFSCSVMHEALHNHYTQKSLSLSPGK

SEQ ID NO: 497 - protein, 217 aa, Artificial Sequence
  Synthetic construct
APEAAGGPSVFLFPPKPKDTLYITREPEVTCVVVDVSHEDPEVKFNWYVDGVEVHNAKTKPREEQYNSTYRVVSVLTVLHQDWLNGKEYKCKVSNKALGAPIEKTISKAKGQPREPQVYTLPPSRDELTKNQVSLWCLVKGFYPSDIAVEWESYGTEWANYKTTPPVLDSDGSFFLYSKLTVSKSEWQQGFVFSCSVMHEALHNHYTQKSLSLSPGK

SEQ ID NO: 498 - protein, 217 aa, Artificial Sequence
  Synthetic construct
APELLGGPSVFLFPPKPKDTLMISRTPEVTCVVVDVSHEDPEVKFNWYVDGVEVHNAKTKPREEQYNSTYRVVSVLTVLHQDWLNGKEYKCKVSNKALPAPIEKTISKAKGQPREPQVYTLPPSRDELTKNQVSLSCAVKGFYPSDIAVEWESYGTEWANYKTTPPVLDSDGSFFLVSKLTVSKSEWQQGFVFSCSVMHEALHNHYTQKSLSLSPGK

SEQ ID NO: 499 - protein, 217 aa, Artificial Sequence
  Synthetic construct
APEAAGGPSVFLFPPKPKDTLMISRTPEVTCVVVDVSHEDPEVKFNWYVDGVEVHNAKTKPREEQYNSTYRVVSVLTVLHQDWLNGKEYKCKVSNKALPAPIEKTISKAKGQPREPQVYTLPPSRDELTKNQVSLSCAVKGFYPSDIAVEWESYGTEWANYKTTPPVLDSDGSFFLVSKLTVSKSEWQQGFVFSCSVMHEALHNHYTQKSLSLSPGK

SEQ ID NO: 500 - protein, 217 aa, Artificial Sequence
  Synthetic construct
APEAAGGPSVFLFPPKPKDTLMISRTPEVTCVVVDVSHEDPEVKFNWYVDGVEVHNAKTKPREEQYNSTYRVVSVLTVLHQDWLNGKEYKCKVSNKALGAPIEKTISKAKGQPREPQVYTLPPSRDELTKNQVSLSCAVKGFYPSDIAVEWESYGTEWANYKTTPPVLDSDGSFFLVSKLTVSKSEWQQGFVFSCSVMHEALHNHYTQKSLSLSPGK

SEQ ID NO: 501 - protein, 217 aa, Artificial Sequence
  Synthetic construct
APELLGGPSVFLFPPKPKDTLYITREPEVTCVVVDVSHEDPEVKFNWYVDGVEVHNAKTKPREEQYNSTYRVVSVLTVLHQDWLNGKEYKCKVSNKALPAPIEKTISKAKGQPREPQVYTLPPSRDELTKNQVSLSCAVKGFYPSDIAVEWESYGTEWANYKTTPPVLDSDGSFFLVSKLTVSKSEWQQGFVFSCSVMHEALHNHYTQKSLSLSPGK

SEQ ID NO: 502 - protein, 217 aa, Artificial Sequence
  Synthetic construct
APEAAGGPSVFLFPPKPKDTLYITREPEVTCVVVDVSHEDPEVKFNWYVDGVEVHNAKTKPREEQYNSTYRVVSVLTVLHQDWLNGKEYKCKVSNKALPAPIEKTISKAKGQPREPQVYTLPPSRDELTKNQVSLSCAVKGFYPSDIAVEWESYGTEWANYKTTPPVLDSDGSFFLVSKLTVSKSEWQQGFVFSCSVMHEALHNHYTQKSLSLSPGK

SEQ ID NO: 503 - protein, 217 aa, Artificial Sequence
  Synthetic construct
APEAAGGPSVFLFPPKPKDTLYITREPEVTCVVVDVSHEDPEVKFNWYVDGVEVHNAKTKPREEQYNSTYRVVSVLTVLHQDWLNGKEYKCKVSNKALGAPIEKTISKAKGQPREPQVYTLPPSRDELTKNQVSLSCAVKGFYPSDIAVEWESYGTEWANYKTTPPVLDSDGSFFLVSKLTVSKSEWQQGFVFSCSVMHEALHNHYTQKSLSLSPGK

SEQ ID NO: 504 - protein, 217 aa, Artificial Sequence
  Synthetic construct
APELLGGPSVFLFPPKPKDTLMISRTPEVTCVVVDVSHEDPEVKFNWYVDGVEVHNAKTKPREEQYNSTYRVVSVLTVLHQDWLNGKEYKCKVSNKALPAPIEKTISKAKGQPREPQVYTLPPSRDELTKNQVSLWCLVKGFYPSDIAVEWESFGTEWSNYKTTPPVLDSDGSFFLYSKLTVSKEEWQQGFVFSCSVMHEALHNHYTQKSLSLSPGK

SEQ ID NO: 505 - protein, 217 aa, Artificial Sequence
  Synthetic construct
APEAAGGPSVFLFPPKPKDTLMISRTPEVTCVVVDVSHEDPEVKFNWYVDGVEVHNAKTKPREEQYNSTYRVVSVLTVLHQDWLNGKEYKCKVSNKALPAPIEKTISKAKGQPREPQVYTLPPSRDELTKNQVSLWCLVKGFYPSDIAVEWESFGTEWSNYKTTPPVLDSDGSFFLYSKLTVSKEEWQQGFVFSCSVMHEALHNHYTQKSLSLSPGK

SEQ ID NO: 506 - protein, 217 aa, Artificial Sequence
  Synthetic construct
APEAAGGPSVFLFPPKPKDTLMISRTPEVTCVVVDVSHEDPEVKFNWYVDGVEVHNAKTKPREEQYNSTYRVVSVLTVLHQDWLNGKEYKCKVSNKALGAPIEKTISKAKGQPREPQVYTLPPSRDELTKNQVSLWCLVKGFYPSDIAVEWESFGTEWSNYKTTPPVLDSDGSFFLYSKLTVSKEEWQQGFVFSCSVMHEALHNHYTQKSLSLSPGK

SEQ ID NO: 507 - protein, 217 aa, Artificial Sequence
  Synthetic construct
APELLGGPSVFLFPPKPKDTLYITREPEVTCVVVDVSHEDPEVKFNWYVDGVEVHNAKTKPREEQYNSTYRVVSVLTVLHQDWLNGKEYKCKVSNKALPAPIEKTISKAKGQPREPQVYTLPPSRDELTKNQVSLWCLVKGFYPSDIAVEWESFGTEWSNYKTTPPVLDSDGSFFLYSKLTVSKEEWQQGFVFSCSVMHEALHNHYTQKSLSLSPGK

SEQ ID NO: 508 - protein, 217 aa, Artificial Sequence
  Synthetic construct
APEAAGGPSVFLFPPKPKDTLYITREPEVTCVVVDVSHEDPEVKFNWYVDGVEVHNAKTKPREEQYNSTYRVVSVLTVLHQDWLNGKEYKCKVSNKALPAPIEKTISKAKGQPREPQVYTLPPSRDELTKNQVSLWCLVKGFYPSDIAVEWESFGTEWSNYKTTPPVLDSDGSFFLYSKLTVSKEEWQQGFVFSCSVMHEALHNHYTQKSLSLSPGK

SEQ ID NO: 509 - protein, 217 aa, Artificial Sequence
  Synthetic construct
APEAAGGPSVFLFPPKPKDTLYITREPEVTCVVVDVSHEDPEVKFNWYVDGVEVHNAKTKPREEQYNSTYRVVSVLTVLHQDWLNGKEYKCKVSNKALGAPIEKTISKAKGQPREPQVYTLPPSRDELTKNQVSLWCLVKGFYPSDIAVEWESFGTEWSNYKTTPPVLDSDGSFFLYSKLTVSKEEWQQGFVFSCSVMHEALHNHYTQKSLSLSPGK

SEQ ID NO: 510 - protein, 217 aa, Artificial Sequence
  Synthetic construct
APELLGGPSVFLFPPKPKDTLMISRTPEVTCVVVDVSHEDPEVKFNWYVDGVEVHNAKTKPREEQYNSTYRVVSVLTVLHQDWLNGKEYKCKVSNKALPAPIEKTISKAKGQPREPQVYTLPPSRDELTKNQVSLSCAVKGFYPSDIAVEWESFGTEWSNYKTTPPVLDSDGSFFLVSKLTVSKEEWQQGFVFSCSVMHEALHNHYTQKSLSLSPGK

SEQ ID NO: 511 - protein, 217 aa, Artificial Sequence
  Synthetic construct
APEAAGGPSVFLFPPKPKDTLMISRTPEVTCVVVDVSHEDPEVKFNWYVDGVEVHNAKTKPREEQYNSTYRVVSVLTVLHQDWLNGKEYKCKVSNKALPAPIEKTISKAKGQPREPQVYTLPPSRDELTKNQVSLSCAVKGFYPSDIAVEWESFGTEWSNYKTTPPVLDSDGSFFLVSKLTVSKEEWQQGFVFSCSVMHEALHNHYTQKSLSLSPGK

SEQ ID NO: 512 - protein, 217 aa, Artificial Sequence
  Synthetic construct
APEAAGGPSVFLFPPKPKDTLMISRTPEVTCVVVDVSHEDPEVKFNWYVDGVEVHNAKTKPREEQYNSTYRVVSVLTVLHQDWLNGKEYKCKVSNKALGAPIEKTISKAKGQPREPQVYTLPPSRDELTKNQVSLSCAVKGFYPSDIAVEWESFGTEWSNYKTTPPVLDSDGSFFLVSKLTVSKEEWQQGFVFSCSVMHEALHNHYTQKSLSLSPGK

SEQ ID NO: 513 - protein, 217 aa, Artificial Sequence
  Synthetic construct
APELLGGPSVFLFPPKPKDTLYITREPEVTCVVVDVSHEDPEVKFNWYVDGVEVHNAKTKPREEQYNSTYRVVSVLTVLHQDWLNGKEYKCKVSNKALPAPIEKTISKAKGQPREPQVYTLPPSRDELTKNQVSLSCAVKGFYPSDIAVEWESFGTEWSNYKTTPPVLDSDGSFFLVSKLTVSKEEWQQGFVFSCSVMHEALHNHYTQKSLSLSPGK

SEQ ID NO: 514 - protein, 217 aa, Artificial Sequence
  Synthetic construct
APEAAGGPSVFLFPPKPKDTLYITREPEVTCVVVDVSHEDPEVKFNWYVDGVEVHNAKTKPREEQYNSTYRVVSVLTVLHQDWLNGKEYKCKVSNKALPAPIEKTISKAKGQPREPQVYTLPPSRDELTKNQVSLSCAVKGFYPSDIAVEWESFGTEWSNYKTTPPVLDSDGSFFLVSKLTVSKEEWQQGFVFSCSVMHEALHNHYTQKSLSLSPGK

SEQ ID NO: 515 - protein, 217 aa, Artificial Sequence
  Synthetic construct
APEAAGGPSVFLFPPKPKDTLYITREPEVTCVVVDVSHEDPEVKFNWYVDGVEVHNAKTKPREEQYNSTYRVVSVLTVLHQDWLNGKEYKCKVSNKALGAPIEKTISKAKGQPREPQVYTLPPSRDELTKNQVSLSCAVKGFYPSDIAVEWESFGTEWSNYKTTPPVLDSDGSFFLVSKLTVSKEEWQQGFVFSCSVMHEALHNHYTQKSLSLSPGK

SEQ ID NO: 516 - protein, 217 aa, Artificial Sequence
  Synthetic construct
APELLGGPSVFLFPPKPKDTLMISRTPEVTCVVVDVSHEDPEVKFNWYVDGVEVHNAKTKPREEQYNSTYRVVSVLTVLHQDWLNGKEYKCKVSNKALPAPIEKTISKAKGQPREPQVYTLPPSRDELTKNQVSLTCLVKGFYPSDIAVEWESFGTEWSSYKTTPPVLDSDGSFFLYSKLTVTKEEWQQGFVFSCSVLHEALHSHYTQKSLSLSPGK

SEQ ID NO: 517 - protein, 217 aa, Artificial Sequence
  Synthetic construct
APELLGGPSVFLFPPKPKDTLMISRTPEVTCVVVDVSHEDPEVKFNWYVDGVEVHNAKTKPREEQYNSTYRVVSVLTVLHQDWLNGKEYKCKVSNKALPAPIEKTISKAKGQPREPQVYTLPPSRDELTKNQVSLWCLVKGFYPSDIAVEWESFGTEWSSYKTTPPVLDSDGSFFLYSKLTVTKEEWQQGFVFSCSVLHEALHSHYTQKSLSLSPGK

SEQ ID NO: 518 - protein, 217 aa, Artificial Sequence
  Synthetic construct
APEAAGGPSVFLFPPKPKDTLMISRTPEVTCVVVDVSHEDPEVKFNWYVDGVEVHNAKTKPREEQYNSTYRVVSVLTVLHQDWLNGKEYKCKVSNKALPAPIEKTISKAKGQPREPQVYTLPPSRDELTKNQVSLWCLVKGFYPSDIAVEWESFGTEWSSYKTTPPVLDSDGSFFLYSKLTVTKEEWQQGFVFSCSVLHEALHSHYTQKSLSLSPGK

SEQ ID NO: 519 - protein, 217 aa, Artificial Sequence
  Synthetic construct
APEAAGGPSVFLFPPKPKDTLMISRTPEVTCVVVDVSHEDPEVKFNWYVDGVEVHNAKTKPREEQYNSTYRVVSVLTVLHQDWLNGKEYKCKVSNKALGAPIEKTISKAKGQPREPQVYTLPPSRDELTKNQVSLWCLVKGFYPSDIAVEWESFGTEWSSYKTTPPVLDSDGSFFLYSKLTVTKEEWQQGFVFSCSVLHEALHSHYTQKSLSLSPGK

SEQ ID NO: 520 - protein, 217 aa, Artificial Sequence
  Synthetic construct
APELLGGPSVFLFPPKPKDTLMISRTPEVTCVVVDVSHEDPEVKFNWYVDGVEVHNAKTKPREEQYNSTYRVVSVLTVLHQDWLNGKEYKCKVSNKALPAPIEKTISKAKGQPREPQVYTLPPSRDELTKNQVSLSCAVKGFYPSDIAVEWESFGTEWSSYKTTPPVLDSDGSFFLVSKLTVTKEEWQQGFVFSCSVLHEALHSHYTQKSLSLSPGK

SEQ ID NO: 521 - protein, 217 aa, Artificial Sequence
  Synthetic construct
APEAAGGPSVFLFPPKPKDTLMISRTPEVTCVVVDVSHEDPEVKFNWYVDGVEVHNAKTKPREEQYNSTYRVVSVLTVLHQDWLNGKEYKCKVSNKALPAPIEKTISKAKGQPREPQVYTLPPSRDELTKNQVSLSCAVKGFYPSDIAVEWESFGTEWSSYKTTPPVLDSDGSFFLVSKLTVTKEEWQQGFVFSCSVLHEALHSHYTQKSLSLSPGK

SEQ ID NO: 522 - protein, 217 aa, Artificial Sequence
  Synthetic construct
APEAAGGPSVFLFPPKPKDTLMISRTPEVTCVVVDVSHEDPEVKFNWYVDGVEVHNAKTKPREEQYNSTYRVVSVLTVLHQDWLNGKEYKCKVSNKALGAPIEKTISKAKGQPREPQVYTLPPSRDELTKNQVSLSCAVKGFYPSDIAVEWESFGTEWSSYKTTPPVLDSDGSFFLVSKLTVTKEEWQQGFVFSCSVLHEALHSHYTQKSLSLSPGK

SEQ ID NO: 523 - protein, 217 aa, Artificial Sequence
  Synthetic construct
APELLGGPSVFLFPPKPKDTLMISRTPEVTCVVVDVSHEDPEVKFNWYVDGVEVHNAKTKPREEQYNSTYRVVSVLTVLHQDWLNGKEYKCKVSNKALPAPIEKTISKAKGQPREPQVYTLPPSRDELTKNQVSLTCLVKGFYPSDIAVEWESYGTEWANYKTTPPVLDSDGSFFLYSKLTVTKEEWQQGFVFSCSVLHEALHSHYTQKSLSLSPGK

SEQ ID NO: 524 - protein, 217 aa, Artificial Sequence
  Synthetic construct
APELLGGPSVFLFPPKPKDTLMISRTPEVTCVVVDVSHEDPEVKFNWYVDGVEVHNAKTKPREEQYNSTYRVVSVLTVLHQDWLNGKEYKCKVSNKALPAPIEKTISKAKGQPREPQVYTLPPSRDELTKNQVSLWCLVKGFYPSDIAVEWESYGTEWANYKTTPPVLDSDGSFFLYSKLTVTKEEWQQGFVFSCSVLHEALHSHYTQKSLSLSPGK

SEQ ID NO: 525 - protein, 217 aa, Artificial Sequence
  Synthetic construct
APEAAGGPSVFLFPPKPKDTLMISRTPEVTCVVVDVSHEDPEVKFNWYVDGVEVHNAKTKPREEQYNSTYRVVSVLTVLHQDWLNGKEYKCKVSNKALPAPIEKTISKAKGQPREPQVYTLPPSRDELTKNQVSLWCLVKGFYPSDIAVEWESYGTEWANYKTTPPVLDSDGSFFLYSKLTVTKEEWQQGFVFSCSVLHEALHSHYTQKSLSLSPGK

SEQ ID NO: 526 - protein, 217 aa, Artificial Sequence
  Synthetic construct
APEAAGGPSVFLFPPKPKDTLMISRTPEVTCVVVDVSHEDPEVKFNWYVDGVEVHNAKTKPREEQYNSTYRVVSVLTVLHQDWLNGKEYKCKVSNKALGAPIEKTISKAKGQPREPQVYTLPPSRDELTKNQVSLWCLVKGFYPSDIAVEWESYGTEWANYKTTPPVLDSDGSFFLYSKLTVTKEEWQQGFVFSCSVLHEALHSHYTQKSLSLSPGK

SEQ ID NO: 527 - protein, 217 aa, Artificial Sequence
  Synthetic construct
APELLGGPSVFLFPPKPKDTLMISRTPEVTCVVVDVSHEDPEVKFNWYVDGVEVHNAKTKPREEQYNSTYRVVSVLTVLHQDWLNGKEYKCKVSNKALPAPIEKTISKAKGQPREPQVYTLPPSRDELTKNQVSLSCAVKGFYPSDIAVEWESYGTEWANYKTTPPVLDSDGSFFLVSKLTVTKEEWQQGFVFSCSVLHEALHSHYTQKSLSLSPGK

SEQ ID NO: 528 - protein, 217 aa, Artificial Sequence
  Synthetic construct
APEAAGGPSVFLFPPKPKDTLMISRTPEVTCVVVDVSHEDPEVKFNWYVDGVEVHNAKTKPREEQYNSTYRVVSVLTVLHQDWLNGKEYKCKVSNKALPAPIEKTISKAKGQPREPQVYTLPPSRDELTKNQVSLSCAVKGFYPSDIAVEWESYGTEWANYKTTPPVLDSDGSFFLVSKLTVTKEEWQQGFVFSCSVLHEALHSHYTQKSLSLSPGK

SEQ ID NO: 529 - protein, 217 aa, Artificial Sequence
  Synthetic construct
APEAAGGPSVFLFPPKPKDTLMISRTPEVTCVVVDVSHEDPEVKFNWYVDGVEVHNAKTKPREEQYNSTYRVVSVLTVLHQDWLNGKEYKCKVSNKALGAPIEKTISKAKGQPREPQVYTLPPSRDELTKNQVSLSCAVKGFYPSDIAVEWESYGTEWANYKTTPPVLDSDGSFFLVSKLTVTKEEWQQGFVFSCSVLHEALHSHYTQKSLSLSPGK

SEQ ID NO: 530 - protein, 217 aa, Artificial Sequence
  Synthetic construct
APELLGGPSVFLFPPKPKDTLMISRTPEVTCVVVDVSHEDPEVKFNWYVDGVEVHNAKTKPREEQYNSTYRVVSVLTVLHQDWLNGKEYKCKVSNKALPAPIEKTISKAKGQPREPQVYTLPPSRDELTKNQVSLTCLVKGFYPSDIAVEWESYGTEWVNYKTTPPVLDSDGSFFLYSKLTVTKEEWQQGFVFSCSVLHEALHSHYTQKSLSLSPGK

SEQ ID NO: 531 - protein, 217 aa, Artificial Sequence
  Synthetic construct
APELLGGPSVFLFPPKPKDTLMISRTPEVTCVVVDVSHEDPEVKFNWYVDGVEVHNAKTKPREEQYNSTYRVVSVLTVLHQDWLNGKEYKCKVSNKALPAPIEKTISKAKGQPREPQVYTLPPSRDELTKNQVSLWCLVKGFYPSDIAVEWESYGTEWVNYKTTPPVLDSDGSFFLYSKLTVTKEEWQQGFVFSCSVLHEALHSHYTQKSLSLSPGK

SEQ ID NO: 532 - protein, 217 aa, Artificial Sequence
  Synthetic construct
APEAAGGPSVFLFPPKPKDTLMISRTPEVTCVVVDVSHEDPEVKFNWYVDGVEVHNAKTKPREEQYNSTYRVVSVLTVLHQDWLNGKEYKCKVSNKALPAPIEKTISKAKGQPREPQVYTLPPSRDELTKNQVSLWCLVKGFYPSDIAVEWESYGTEWVNYKTTPPVLDSDGSFFLYSKLTVTKEEWQQGFVFSCSVLHEALHSHYTQKSLSLSPGK

SEQ ID NO: 533 - protein, 217 aa, Artificial Sequence
  Synthetic construct
APEAAGGPSVFLFPPKPKDTLMISRTPEVTCVVVDVSHEDPEVKFNWYVDGVEVHNAKTKPREEQYNSTYRVVSVLTVLHQDWLNGKEYKCKVSNKALGAPIEKTISKAKGQPREPQVYTLPPSRDELTKNQVSLWCLVKGFYPSDIAVEWESYGTEWVNYKTTPPVLDSDGSFFLYSKLTVTKEEWQQGFVFSCSVLHEALHSHYTQKSLSLSPGK

SEQ ID NO: 534 - protein, 217 aa, Artificial Sequence
  Synthetic construct
APELLGGPSVFLFPPKPKDTLMISRTPEVTCVVVDVSHEDPEVKFNWYVDGVEVHNAKTKPREEQYNSTYRVVSVLTVLHQDWLNGKEYKCKVSNKALPAPIEKTISKAKGQPREPQVYTLPPSRDELTKNQVSLSCAVKGFYPSDIAVEWESYGTEWVNYKTTPPVLDSDGSFFLVSKLTVTKEEWQQGFVFSCSVLHEALHSHYTQKSLSLSPGK

SEQ ID NO: 535 - protein, 217 aa, Artificial Sequence
  Synthetic construct
APEAAGGPSVFLFPPKPKDTLMISRTPEVTCVVVDVSHEDPEVKFNWYVDGVEVHNAKTKPREEQYNSTYRVVSVLTVLHQDWLNGKEYKCKVSNKALPAPIEKTISKAKGQPREPQVYTLPPSRDELTKNQVSLSCAVKGFYPSDIAVEWESYGTEWVNYKTTPPVLDSDGSFFLVSKLTVTKEEWQQGFVFSCSVLHEALHSHYTQKSLSLSPGK

SEQ ID NO: 536 - protein, 217 aa, Artificial Sequence
  Synthetic construct
APEAAGGPSVFLFPPKPKDTLMISRTPEVTCVVVDVSHEDPEVKFNWYVDGVEVHNAKTKPREEQYNSTYRVVSVLTVLHQDWLNGKEYKCKVSNKALGAPIEKTISKAKGQPREPQVYTLPPSRDELTKNQVSLSCAVKGFYPSDIAVEWESYGTEWVNYKTTPPVLDSDGSFFLVSKLTVTKEEWQQGFVFSCSVLHEALHSHYTQKSLSLSPGK

SEQ ID NO: 537 - protein, 217 aa, Artificial Sequence
  Synthetic construct
APELLGGPSVFLFPPKPKDTLMISRTPEVTCVVVDVSHEDPEVKFNWYVDGVEVHNAKTKPREEQYNSTYRVVSVLTVLHQDWLNGKEYKCKVSNKALPAPIEKTISKAKGQPREPQVYTLPPSRDELTKNQVSLTCLVKGFYPSDIAVEWESYGTEWSNYKTTPPVLDSDGSFFLYSKLTVSKEEWQQGFVFSCSVLHEALHSHYTQKSLSLSPGK

SEQ ID NO: 538 - protein, 217 aa, Artificial Sequence
  Synthetic construct
APELLGGPSVFLFPPKPKDTLMISRTPEVTCVVVDVSHEDPEVKFNWYVDGVEVHNAKTKPREEQYNSTYRVVSVLTVLHQDWLNGKEYKCKVSNKALPAPIEKTISKAKGQPREPQVYTLPPSRDELTKNQVSLWCLVKGFYPSDIAVEWESYGTEWSNYKTTPPVLDSDGSFFLYSKLTVSKEEWQQGFVFSCSVLHEALHSHYTQKSLSLSPGK

SEQ ID NO: 539 - protein, 217 aa, Artificial Sequence
  Synthetic construct
APEAAGGPSVFLFPPKPKDTLMISRTPEVTCVVVDVSHEDPEVKFNWYVDGVEVHNAKTKPREEQYNSTYRVVSVLTVLHQDWLNGKEYKCKVSNKALPAPIEKTISKAKGQPREPQVYTLPPSRDELTKNQVSLWCLVKGFYPSDIAVEWESYGTEWSNYKTTPPVLDSDGSFFLYSKLTVSKEEWQQGFVFSCSVLHEALHSHYTQKSLSLSPGK

SEQ ID NO: 540 - protein, 217 aa, Artificial Sequence
  Synthetic construct
APEAAGGPSVFLFPPKPKDTLMISRTPEVTCVVVDVSHEDPEVKFNWYVDGVEVHNAKTKPREEQYNSTYRVVSVLTVLHQDWLNGKEYKCKVSNKALGAPIEKTISKAKGQPREPQVYTLPPSRDELTKNQVSLWCLVKGFYPSDIAVEWESYGTEWSNYKTTPPVLDSDGSFFLYSKLTVSKEEWQQGFVFSCSVLHEALHSHYTQKSLSLSPGK

SEQ ID NO: 541 - protein, 217 aa, Artificial Sequence
  Synthetic construct
APELLGGPSVFLFPPKPKDTLMISRTPEVTCVVVDVSHEDPEVKFNWYVDGVEVHNAKTKPREEQYNSTYRVVSVLTVLHQDWLNGKEYKCKVSNKALPAPIEKTISKAKGQPREPQVYTLPPSRDELTKNQVSLSCAVKGFYPSDIAVEWESYGTEWSNYKTTPPVLDSDGSFFLVSKLTVSKEEWQQGFVFSCSVLHEALHSHYTQKSLSLSPGK

SEQ ID NO: 542 - protein, 217 aa, Artificial Sequence
  Synthetic construct
APEAAGGPSVFLFPPKPKDTLMISRTPEVTCVVVDVSHEDPEVKFNWYVDGVEVHNAKTKPREEQYNSTYRVVSVLTVLHQDWLNGKEYKCKVSNKALPAPIEKTISKAKGQPREPQVYTLPPSRDELTKNQVSLSCAVKGFYPSDIAVEWESYGTEWSNYKTTPPVLDSDGSFFLVSKLTVSKEEWQQGFVFSCSVLHEALHSHYTQKSLSLSPGK

SEQ ID NO: 543 - protein, 217 aa, Artificial Sequence
  Synthetic construct
APEAAGGPSVFLFPPKPKDTLMISRTPEVTCVVVDVSHEDPEVKFNWYVDGVEVHNAKTKPREEQYNSTYRVVSVLTVLHQDWLNGKEYKCKVSNKALGAPIEKTISKAKGQPREPQVYTLPPSRDELTKNQVSLSCAVKGFYPSDIAVEWESYGTEWSNYKTTPPVLDSDGSFFLVSKLTVSKEEWQQGFVFSCSVLHEALHSHYTQKSLSLSPGK

SEQ ID NO: 544 - protein, 217 aa, Artificial Sequence
  Synthetic construct
APELLGGPSVFLFPPKPKDTLMISRTPEVTCVVVDVSHEDPEVKFNWYVDGVEVHNAKTKPREEQYNSTYRVVSVLTVLHQDWLNGKEYKCKVSNKALPAPIEKTISKAKGQPREPQVYTLPPSRDELTKNQVSLTCLVKGFYPSDIAVLWESYGTEWASYKTTPPVLDSDGSFFLYSKLTVTKEEWQQGFVFSCSVLHEALHSHYTQKSLSLSPGK

SEQ ID NO: 545 - protein, 217 aa, Artificial Sequence
  Synthetic construct
APELLGGPSVFLFPPKPKDTLMISRTPEVTCVVVDVSHEDPEVKFNWYVDGVEVHNAKTKPREEQYNSTYRVVSVLTVLHQDWLNGKEYKCKVSNKALPAPIEKTISKAKGQPREPQVYTLPPSRDELTKNQVSLWCLVKGFYPSDIAVLWESYGTEWASYKTTPPVLDSDGSFFLYSKLTVTKEEWQQGFVFSCSVLHEALHSHYTQKSLSLSPGK

SEQ ID NO: 546 - protein, 217 aa, Artificial Sequence
  Synthetic construct
APEAAGGPSVFLFPPKPKDTLMISRTPEVTCVVVDVSHEDPEVKFNWYVDGVEVHNAKTKPREEQYNSTYRVVSVLTVLHQDWLNGKEYKCKVSNKALPAPIEKTISKAKGQPREPQVYTLPPSRDELTKNQVSLWCLVKGFYPSDIAVLWESYGTEWASYKTTPPVLDSDGSFFLYSKLTVTKEEWQQGFVFSCSVLHEALHSHYTQKSLSLSPGK

SEQ ID NO: 547 - protein, 217 aa, Artificial Sequence
  Synthetic construct
APEAAGGPSVFLFPPKPKDTLMISRTPEVTCVVVDVSHEDPEVKFNWYVDGVEVHNAKTKPREEQYNSTYRVVSVLTVLHQDWLNGKEYKCKVSNKALGAPIEKTISKAKGQPREPQVYTLPPSRDELTKNQVSLWCLVKGFYPSDIAVLWESYGTEWASYKTTPPVLDSDGSFFLYSKLTVTKEEWQQGFVFSCSVLHEALHSHYTQKSLSLSPGK

SEQ ID NO: 548 - protein, 217 aa, Artificial Sequence
  Synthetic construct
APELLGGPSVFLFPPKPKDTLMISRTPEVTCVVVDVSHEDPEVKFNWYVDGVEVHNAKTKPREEQYNSTYRVVSVLTVLHQDWLNGKEYKCKVSNKALPAPIEKTISKAKGQPREPQVYTLPPSRDELTKNQVSLSCAVKGFYPSDIAVLWESYGTEWASYKTTPPVLDSDGSFFLVSKLTVTKEEWQQGFVFSCSVLHEALHSHYTQKSLSLSPGK

SEQ ID NO: 549 - protein, 217 aa, Artificial Sequence
  Synthetic construct
APEAAGGPSVFLFPPKPKDTLMISRTPEVTCVVVDVSHEDPEVKFNWYVDGVEVHNAKTKPREEQYNSTYRVVSVLTVLHQDWLNGKEYKCKVSNKALPAPIEKTISKAKGQPREPQVYTLPPSRDELTKNQVSLSCAVKGFYPSDIAVLWESYGTEWASYKTTPPVLDSDGSFFLVSKLTVTKEEWQQGFVFSCSVLHEALHSHYTQKSLSLSPGK

SEQ ID NO: 550 - protein, 217 aa, Artificial Sequence
  Synthetic construct
APEAAGGPSVFLFPPKPKDTLMISRTPEVTCVVVDVSHEDPEVKFNWYVDGVEVHNAKTKPREEQYNSTYRVVSVLTVLHQDWLNGKEYKCKVSNKALGAPIEKTISKAKGQPREPQVYTLPPSRDELTKNQVSLSCAVKGFYPSDIAVLWESYGTEWASYKTTPPVLDSDGSFFLVSKLTVTKEEWQQGFVFSCSVLHEALHSHYTQKSLSLSPGK

SEQ ID NO: 551 - protein, 217 aa, Artificial Sequence
  Synthetic construct
APELLGGPSVFLFPPKPKDTLMISRTPEVTCVVVDVSHEDPEVKFNWYVDGVEVHNAKTKPREEQYNSTYRVVSVLTVLHQDWLNGKEYKCKVSNKALPAPIEKTISKAKGQPREPQVYTLPPSRDELTKNQVSLTCLVKGFYPSDIAVEWESYGTEWSNYKTTPPVLDSDGSFFLYSKLTVTKEEWQQGFVFSCSVLHEALHSHYTQKSLSLSPGK

SEQ ID NO: 552 - protein, 217 aa, Artificial Sequence
  Synthetic construct
APELLGGPSVFLFPPKPKDTLMISRTPEVTCVVVDVSHEDPEVKFNWYVDGVEVHNAKTKPREEQYNSTYRVVSVLTVLHQDWLNGKEYKCKVSNKALPAPIEKTISKAKGQPREPQVYTLPPSRDELTKNQVSLWCLVKGFYPSDIAVEWESYGTEWSNYKTTPPVLDSDGSFFLYSKLTVTKEEWQQGFVFSCSVLHEALHSHYTQKSLSLSPGK

SEQ ID NO: 553 - protein, 217 aa, Artificial Sequence
  Synthetic construct
APEAAGGPSVFLFPPKPKDTLMISRTPEVTCVVVDVSHEDPEVKFNWYVDGVEVHNAKTKPREEQYNSTYRVVSVLTVLHQDWLNGKEYKCKVSNKALPAPIEKTISKAKGQPREPQVYTLPPSRDELTKNQVSLWCLVKGFYPSDIAVEWESYGTEWSNYKTTPPVLDSDGSFFLYSKLTVTKEEWQQGFVFSCSVLHEALHSHYTQKSLSLSPGK

SEQ ID NO: 554 - protein, 217 aa, Artificial Sequence
  Synthetic construct
APEAAGGPSVFLFPPKPKDTLMISRTPEVTCVVVDVSHEDPEVKFNWYVDGVEVHNAKTKPREEQYNSTYRVVSVLTVLHQDWLNGKEYKCKVSNKALGAPIEKTISKAKGQPREPQVYTLPPSRDELTKNQVSLWCLVKGFYPSDIAVEWESYGTEWSNYKTTPPVLDSDGSFFLYSKLTVTKEEWQQGFVFSCSVLHEALHSHYTQKSLSLSPGK

SEQ ID NO: 555 - protein, 217 aa, Artificial Sequence
  Synthetic construct
APELLGGPSVFLFPPKPKDTLMISRTPEVTCVVVDVSHEDPEVKFNWYVDGVEVHNAKTKPREEQYNSTYRVVSVLTVLHQDWLNGKEYKCKVSNKALPAPIEKTISKAKGQPREPQVYTLPPSRDELTKNQVSLSCAVKGFYPSDIAVEWESYGTEWSNYKTTPPVLDSDGSFFLVSKLTVTKEEWQQGFVFSCSVLHEALHSHYTQKSLSLSPGK

SEQ ID NO: 556 - protein, 217 aa, Artificial Sequence
  Synthetic construct
APEAAGGPSVFLFPPKPKDTLMISRTPEVTCVVVDVSHEDPEVKFNWYVDGVEVHNAKTKPREEQYNSTYRVVSVLTVLHQDWLNGKEYKCKVSNKALPAPIEKTISKAKGQPREPQVYTLPPSRDELTKNQVSLSCAVKGFYPSDIAVEWESYGTEWSNYKTTPPVLDSDGSFFLVSKLTVTKEEWQQGFVFSCSVLHEALHSHYTQKSLSLSPGK

SEQ ID NO: 557 - protein, 217 aa, Artificial Sequence
  Synthetic construct
APEAAGGPSVFLFPPKPKDTLMISRTPEVTCVVVDVSHEDPEVKFNWYVDGVEVHNAKTKPREEQYNSTYRVVSVLTVLHQDWLNGKEYKCKVSNKALGAPIEKTISKAKGQPREPQVYTLPPSRDELTKNQVSLSCAVKGFYPSDIAVEWESYGTEWSNYKTTPPVLDSDGSFFLVSKLTVTKEEWQQGFVFSCSVLHEALHSHYTQKSLSLSPGK

SEQ ID NO: 558 - protein, 217 aa, Artificial Sequence
  Synthetic construct
APELLGGPSVFLFPPKPKDTLMISRTPEVTCVVVDVSHEDPEVKFNWYVDGVEVHNAKTKPREEQYNSTYRVVSVLTVLHQDWLNGKEYKCKVSNKALPAPIEKTISKAKGQPREPQVYTLPPSRDELTKNQVSLTCLVKGFYPSDIAVWWESYGTEWSSYKTTPPVLDSDGSFFLYSKLTVTKEEWQQGFVFSCSVLHEALHSHYTQKSLSLSPGK

SEQ ID NO: 559 - protein, 217 aa, Artificial Sequence
  Synthetic construct
APELLGGPSVFLFPPKPKDTLMISRTPEVTCVVVDVSHEDPEVKFNWYVDGVEVHNAKTKPREEQYNSTYRVVSVLTVLHQDWLNGKEYKCKVSNKALPAPIEKTISKAKGQPREPQVYTLPPSRDELTKNQVSLWCLVKGFYPSDIAVWWESYGTEWSSYKTTPPVLDSDGSFFLYSKLTVTKEEWQQGFVFSCSVLHEALHSHYTQKSLSLSPGK

SEQ ID NO: 560 - protein, 217 aa, Artificial Sequence
  Synthetic construct
APEAAGGPSVFLFPPKPKDTLMISRTPEVTCVVVDVSHEDPEVKFNWYVDGVEVHNAKTKPREEQYNSTYRVVSVLTVLHQDWLNGKEYKCKVSNKALPAPIEKTISKAKGQPREPQVYTLPPSRDELTKNQVSLWCLVKGFYPSDIAVWWESYGTEWSSYKTTPPVLDSDGSFFLYSKLTVTKEEWQQGFVFSCSVLHEALHSHYTQKSLSLSPGK

SEQ ID NO: 561 - protein, 217 aa, Artificial Sequence
  Synthetic construct
APEAAGGPSVFLFPPKPKDTLMISRTPEVTCVVVDVSHEDPEVKFNWYVDGVEVHNAKTKPREEQYNSTYRVVSVLTVLHQDWLNGKEYKCKVSNKALGAPIEKTISKAKGQPREPQVYTLPPSRDELTKNQVSLWCLVKGFYPSDIAVWWESYGTEWSSYKTTPPVLDSDGSFFLYSKLTVTKEEWQQGFVFSCSVLHEALHSHYTQKSLSLSPGK

SEQ ID NO: 562 - protein, 217 aa, Artificial Sequence
  Synthetic construct
APELLGGPSVFLFPPKPKDTLMISRTPEVTCVVVDVSHEDPEVKFNWYVDGVEVHNAKTKPREEQYNSTYRVVSVLTVLHQDWLNGKEYKCKVSNKALPAPIEKTISKAKGQPREPQVYTLPPSRDELTKNQVSLSCAVKGFYPSDIAVWWESYGTEWSSYKTTPPVLDSDGSFFLVSKLTVTKEEWQQGFVFSCSVLHEALHSHYTQKSLSLSPGK

SEQ ID NO: 563 - protein, 217 aa, Artificial Sequence
  Synthetic construct
APEAAGGPSVFLFPPKPKDTLMISRTPEVTCVVVDVSHEDPEVKFNWYVDGVEVHNAKTKPREEQYNSTYRVVSVLTVLHQDWLNGKEYKCKVSNKALPAPIEKTISKAKGQPREPQVYTLPPSRDELTKNQVSLSCAVKGFYPSDIAVWWESYGTEWSSYKTTPPVLDSDGSFFLVSKLTVTKEEWQQGFVFSCSVLHEALHSHYTQKSLSLSPGK

SEQ ID NO: 564 - protein, 217 aa, Artificial Sequence
  Synthetic construct
APEAAGGPSVFLFPPKPKDTLMISRTPEVTCVVVDVSHEDPEVKFNWYVDGVEVHNAKTKPREEQYNSTYRVVSVLTVLHQDWLNGKEYKCKVSNKALGAPIEKTISKAKGQPREPQVYTLPPSRDELTKNQVSLSCAVKGFYPSDIAVWWESYGTEWSSYKTTPPVLDSDGSFFLVSKLTVTKEEWQQGFVFSCSVLHEALHSHYTQKSLSLSPGK

SEQ ID NO: 565 - protein, 217 aa, Artificial Sequence
  Synthetic construct
APELLGGPSVFLFPPKPKDTLMISRTPEVTCVVVDVSHEDPEVKFNWYVDGVEVHNAKTKPREEQYNSTYRVVSVLTVLHQDWLNGKEYKCKVSNKALPAPIEKTISKAKGQPREPQVYTLPPSRDELTKNQVSLTCLVKGFYPSDIAVEWESFGTEWSSYKTTPPVLDSDGSFFLYSKLTVSKEEWQQGFVFSCSVLHEALHSHYTQKSLSLSPGK

SEQ ID NO: 566 - protein, 217 aa, Artificial Sequence
  Synthetic construct
APELLGGPSVFLFPPKPKDTLMISRTPEVTCVVVDVSHEDPEVKFNWYVDGVEVHNAKTKPREEQYNSTYRVVSVLTVLHQDWLNGKEYKCKVSNKALPAPIEKTISKAKGQPREPQVYTLPPSRDELTKNQVSLWCLVKGFYPSDIAVEWESFGTEWSSYKTTPPVLDSDGSFFLYSKLTVSKEEWQQGFVFSCSVLHEALHSHYTQKSLSLSPGK

SEQ ID NO: 567 - protein, 217 aa, Artificial Sequence
  Synthetic construct
APEAAGGPSVFLFPPKPKDTLMISRTPEVTCVVVDVSHEDPEVKFNWYVDGVEVHNAKTKPREEQYNSTYRVVSVLTVLHQDWLNGKEYKCKVSNKALPAPIEKTISKAKGQPREPQVYTLPPSRDELTKNQVSLWCLVKGFYPSDIAVEWESFGTEWSSYKTTPPVLDSDGSFFLYSKLTVSKEEWQQGFVFSCSVLHEALHSHYTQKSLSLSPGK

SEQ ID NO: 568 - protein, 217 aa, Artificial Sequence
  Synthetic construct
APEAAGGPSVFLFPPKPKDTLMISRTPEVTCVVVDVSHEDPEVKFNWYVDGVEVHNAKTKPREEQYNSTYRVVSVLTVLHQDWLNGKEYKCKVSNKALGAPIEKTISKAKGQPREPQVYTLPPSRDELTKNQVSLWCLVKGFYPSDIAVEWESFGTEWSSYKTTPPVLDSDGSFFLYSKLTVSKEEWQQGFVFSCSVLHEALHSHYTQKSLSLSPGK

SEQ ID NO: 569 - protein, 217 aa, Artificial Sequence
  Synthetic construct
APELLGGPSVFLFPPKPKDTLMISRTPEVTCVVVDVSHEDPEVKFNWYVDGVEVHNAKTKPREEQYNSTYRVVSVLTVLHQDWLNGKEYKCKVSNKALPAPIEKTISKAKGQPREPQVYTLPPSRDELTKNQVSLSCAVKGFYPSDIAVEWESFGTEWSSYKTTPPVLDSDGSFFLVSKLTVSKEEWQQGFVFSCSVLHEALHSHYTQKSLSLSPGK

SEQ ID NO: 570 - protein, 217 aa, Artificial Sequence
  Synthetic construct
APEAAGGPSVFLFPPKPKDTLMISRTPEVTCVVVDVSHEDPEVKFNWYVDGVEVHNAKTKPREEQYNSTYRVVSVLTVLHQDWLNGKEYKCKVSNKALPAPIEKTISKAKGQPREPQVYTLPPSRDELTKNQVSLSCAVKGFYPSDIAVEWESFGTEWSSYKTTPPVLDSDGSFFLVSKLTVSKEEWQQGFVFSCSVLHEALHSHYTQKSLSLSPGK

SEQ ID NO: 571 - protein, 217 aa, Artificial Sequence
  Synthetic construct
APEAAGGPSVFLFPPKPKDTLMISRTPEVTCVVVDVSHEDPEVKFNWYVDGVEVHNAKTKPREEQYNSTYRVVSVLTVLHQDWLNGKEYKCKVSNKALGAPIEKTISKAKGQPREPQVYTLPPSRDELTKNQVSLSCAVKGFYPSDIAVEWESFGTEWSSYKTTPPVLDSDGSFFLVSKLTVSKEEWQQGFVFSCSVLHEALHSHYTQKSLSLSPGK

SEQ ID NO: 572 - protein, 217 aa, Artificial Sequence
  Synthetic construct
APELLGGPSVFLFPPKPKDTLMISRTPEVTCVVVDVSHEDPEVKFNWYVDGVEVHNAKTKPREEQYNSTYRVVSVLTVLHQDWLNGKEYKCKVSNKALPAPIEKTISKAKGQPREPQVYTLPPSRDELTKNQVSLTCLVKGFYPSDIAVEWESYGTEWANYKTTPPVLDSDGSFFLYSKLTVSKSEWQQGFVFSCSVLHEALHSHYTQKSLSLSPGK

SEQ ID NO: 573 - protein, 217 aa, Artificial Sequence
  Synthetic construct
APELLGGPSVFLFPPKPKDTLMISRTPEVTCVVVDVSHEDPEVKFNWYVDGVEVHNAKTKPREEQYNSTYRVVSVLTVLHQDWLNGKEYKCKVSNKALPAPIEKTISKAKGQPREPQVYTLPPSRDELTKNQVSLWCLVKGFYPSDIAVEWESYGTEWANYKTTPPVLDSDGSFFLYSKLTVSKSEWQQGFVFSCSVLHEALHSHYTQKSLSLSPGK

SEQ ID NO: 574 - protein, 217 aa, Artificial Sequence
  Synthetic construct
APEAAGGPSVFLFPPKPKDTLMISRTPEVTCVVVDVSHEDPEVKFNWYVDGVEVHNAKTKPREEQYNSTYRVVSVLTVLHQDWLNGKEYKCKVSNKALPAPIEKTISKAKGQPREPQVYTLPPSRDELTKNQVSLWCLVKGFYPSDIAVEWESYGTEWANYKTTPPVLDSDGSFFLYSKLTVSKSEWQQGFVFSCSVLHEALHSHYTQKSLSLSPGK

SEQ ID NO: 575 - protein, 217 aa, Artificial Sequence
  Synthetic construct
APEAAGGPSVFLFPPKPKDTLMISRTPEVTCVVVDVSHEDPEVKFNWYVDGVEVHNAKTKPREEQYNSTYRVVSVLTVLHQDWLNGKEYKCKVSNKALGAPIEKTISKAKGQPREPQVYTLPPSRDELTKNQVSLWCLVKGFYPSDIAVEWESYGTEWANYKTTPPVLDSDGSFFLYSKLTVSKSEWQQGFVFSCSVLHEALHSHYTQKSLSLSPGK

SEQ ID NO: 576 - protein, 217 aa, Artificial Sequence
  Synthetic construct
APELLGGPSVFLFPPKPKDTLMISRTPEVTCVVVDVSHEDPEVKFNWYVDGVEVHNAKTKPREEQYNSTYRVVSVLTVLHQDWLNGKEYKCKVSNKALPAPIEKTISKAKGQPREPQVYTLPPSRDELTKNQVSLSCAVKGFYPSDIAVEWESYGTEWANYKTTPPVLDSDGSFFLVSKLTVSKSEWQQGFVFSCSVLHEALHSHYTQKSLSLSPGK

SEQ ID NO: 577 - protein, 217 aa, Artificial Sequence
  Synthetic construct
APEAAGGPSVFLFPPKPKDTLMISRTPEVTCVVVDVSHEDPEVKFNWYVDGVEVHNAKTKPREEQYNSTYRVVSVLTVLHQDWLNGKEYKCKVSNKALPAPIEKTISKAKGQPREPQVYTLPPSRDELTKNQVSLSCAVKGFYPSDIAVEWESYGTEWANYKTTPPVLDSDGSFFLVSKLTVSKSEWQQGFVFSCSVLHEALHSHYTQKSLSLSPGK

SEQ ID NO: 578 - protein, 217 aa, Artificial Sequence
  Synthetic construct
APEAAGGPSVFLFPPKPKDTLMISRTPEVTCVVVDVSHEDPEVKFNWYVDGVEVHNAKTKPREEQYNSTYRVVSVLTVLHQDWLNGKEYKCKVSNKALGAPIEKTISKAKGQPREPQVYTLPPSRDELTKNQVSLSCAVKGFYPSDIAVEWESYGTEWANYKTTPPVLDSDGSFFLVSKLTVSKSEWQQGFVFSCSVLHEALHSHYTQKSLSLSPGK

SEQ ID NO: 579 - protein, 217 aa, Artificial Sequence
  Synthetic construct
APELLGGPSVFLFPPKPKDTLMISRTPEVTCVVVDVSHEDPEVKFNWYVDGVEVHNAKTKPREEQYNSTYRVVSVLTVLHQDWLNGKEYKCKVSNKALPAPIEKTISKAKGQPREPQVYTLPPSRDELTKNQVSLTCLVKGFYPSDIAVEWESFGTEWSNYKTTPPVLDSDGSFFLYSKLTVSKEEWQQGFVFSCSVLHEALHSHYTQKSLSLSPGK

SEQ ID NO: 580 - protein, 217 aa, Artificial Sequence
  Synthetic construct
APELLGGPSVFLFPPKPKDTLMISRTPEVTCVVVDVSHEDPEVKFNWYVDGVEVHNAKTKPREEQYNSTYRVVSVLTVLHQDWLNGKEYKCKVSNKALPAPIEKTISKAKGQPREPQVYTLPPSRDELTKNQVSLWCLVKGFYPSDIAVEWESFGTEWSNYKTTPPVLDSDGSFFLYSKLTVSKEEWQQGFVFSCSVLHEALHSHYTQKSLSLSPGK

SEQ ID NO: 581 - protein, 217 aa, Artificial Sequence
  Synthetic construct
APEAAGGPSVFLFPPKPKDTLMISRTPEVTCVVVDVSHEDPEVKFNWYVDGVEVHNAKTKPREEQYNSTYRVVSVLTVLHQDWLNGKEYKCKVSNKALPAPIEKTISKAKGQPREPQVYTLPPSRDELTKNQVSLWCLVKGFYPSDIAVEWESFGTEWSNYKTTPPVLDSDGSFFLYSKLTVSKEEWQQGFVFSCSVLHEALHSHYTQKSLSLSPGK

SEQ ID NO: 582 - protein, 217 aa, Artificial Sequence
  Synthetic construct
APEAAGGPSVFLFPPKPKDTLMISRTPEVTCVVVDVSHEDPEVKFNWYVDGVEVHNAKTKPREEQYNSTYRVVSVLTVLHQDWLNGKEYKCKVSNKALGAPIEKTISKAKGQPREPQVYTLPPSRDELTKNQVSLWCLVKGFYPSDIAVEWESFGTEWSNYKTTPPVLDSDGSFFLYSKLTVSKEEWQQGFVFSCSVLHEALHSHYTQKSLSLSPGK

SEQ ID NO: 583 - protein, 217 aa, Artificial Sequence
  Synthetic construct
APELLGGPSVFLFPPKPKDTLMISRTPEVTCVVVDVSHEDPEVKFNWYVDGVEVHNAKTKPREEQYNSTYRVVSVLTVLHQDWLNGKEYKCKVSNKALPAPIEKTISKAKGQPREPQVYTLPPSRDELTKNQVSLSCAVKGFYPSDIAVEWESFGTEWSNYKTTPPVLDSDGSFFLVSKLTVSKEEWQQGFVFSCSVLHEALHSHYTQKSLSLSPGK

SEQ ID NO: 584 - protein, 217 aa, Artificial Sequence
  Synthetic construct
APEAAGGPSVFLFPPKPKDTLMISRTPEVTCVVVDVSHEDPEVKFNWYVDGVEVHNAKTKPREEQYNSTYRVVSVLTVLHQDWLNGKEYKCKVSNKALPAPIEKTISKAKGQPREPQVYTLPPSRDELTKNQVSLSCAVKGFYPSDIAVEWESFGTEWSNYKTTPPVLDSDGSFFLVSKLTVSKEEWQQGFVFSCSVLHEALHSHYTQKSLSLSPGK

SEQ ID NO: 585 - protein, 217 aa, Artificial Sequence
  Synthetic construct
APEAAGGPSVFLFPPKPKDTLMISRTPEVTCVVVDVSHEDPEVKFNWYVDGVEVHNAKTKPREEQYNSTYRVVSVLTVLHQDWLNGKEYKCKVSNKALGAPIEKTISKAKGQPREPQVYTLPPSRDELTKNQVSLSCAVKGFYPSDIAVEWESFGTEWSNYKTTPPVLDSDGSFFLVSKLTVSKEEWQQGFVFSCSVLHEALHSHYTQKSLSLSPGK

SEQ ID NO: 586 - protein, 10 aa, Artificial Sequence
  Synthetic construct
GFTFSQVGMS

SEQ ID NO: 587 - protein, 10 aa, Artificial Sequence
  Synthetic construct
GFKFSGPGMS

SEQ ID NO: 588 - protein, 18 aa, Artificial Sequence
  Synthetic construct
SISGDGGSYIHYADSVKG

SEQ ID NO: 589 - protein, 113 aa, Artificial Sequence
  Synthetic construct
EVQLLESGGGLVQPGGSLRLSCAASGFTFSRVGTSWVRQAPGKGLEWVASISGDGGSYIHYADSVKGRFTISRDNSKNTLYLQMNSLRAEDTAVYYCARLPYWGQGTLVTVSS

SEQ ID NO: 590 - protein, 113 aa, Artificial Sequence
  Synthetic construct
EVQLLESGGGLVQPGGSLRLSCAASGFTFSSVGTSWVRQAPGKGLEWVASISGDGGSYIHYADSVKGRFTISRDNSKNTLYLQMNSLRAEDTAVYYCARLPYWGQGTLVTVSS

SEQ ID NO: 591 - protein, 113 aa, Artificial Sequence
  Synthetic construct
EVQLLESGGGLVQPGGSLRLSCAASGFTFSMVGTSWVRQAPGKGLEWVASISGDGGSYIHYADSVKGRFTISRDNSKNTLYLQMNSLRAEDTAVYYCARLPYWGQGTLVTVSS

SEQ ID NO: 592 - protein, 113 aa, Artificial Sequence
  Synthetic construct
EVQLLESGGGLVQPGGSLRLSCAASGFTFSQVGTSWVRQAPGKGLEWVASISGDGGSYIHYADSVKGRFTISRDNSKNTLYLQMNSLRAEDTAVYYCARLPYWGQGTLVTVSS

SEQ ID NO: 593 - protein, 113 aa, Artificial Sequence
  Synthetic construct
EVQLLESGGGLVQPGGSLRLSCAASGFTFSLVGTSWVRQAPGKGLEWVASISGDGGSYIHYADSVKGRFTISRDNSKNTLYLQMNSLRAEDTAVYYCARLPYWGQGTLVTVSS

SEQ ID NO: 594 - protein, 113 aa, Artificial Sequence
  Synthetic construct
EVQLLESGGGLVQPGGSLRLSCAASGFTFSKVGTSWVRQAPGKGLEWVASISGDGGSYIHYADSVKGRFTISRDNSKNTLYLQMNSLRAEDTAVYYCARLPYWGQGTLVTVSS

SEQ ID NO: 595 - protein, 113 aa, Artificial Sequence
  Synthetic construct
EVQLLESGGGLVQPGGSLRLSCAASGFTFSRVGMSWVRQAPGKGLEWVASISGDGGSYIHYADSVKGRFTISRDNSKNTLYLQMNSLRAEDTAVYYCARLPYWGQGTLVTVSS

SEQ ID NO: 596 - protein, 113 aa, Artificial Sequence
  Synthetic construct
EVQLLESGGGLVQPGGSLRLSCAASGFRFSGPGMSWVRQAPGKGLEWVASISGDGGSYIHYADSVKGRFTISRDNSKNTLYLQMNSLRAEDTAVYYCARLPYWGQGTLVTVSS

SEQ ID NO: 597 - protein, 113 aa, Artificial Sequence
  Synthetic construct
EVQLLESGGGLVQPGGSLRLSCAASGFTFSGPGMSWVRQAPGKGLEWVASISGDGGSYIHYADSVKGRFTISRDNSKNTLYLQMNSLRAEDTAVYYCARLPYWGQGTLVTVSS

SEQ ID NO: 598 - protein, 113 aa, Artificial Sequence
  Synthetic construct
EVQLLESGGGLVQPGGSLRLSCAASGFQFSGPGMSWVRQAPGKGLEWVASISGDGGSYIHYADSVKGRFTISRDNSKNTLYLQMNSLRAEDTAVYYCARLPYWGQGTLVTVSS

SEQ ID NO: 599 - protein, 113 aa, Artificial Sequence
  Synthetic construct
EVQLLESGGGLVQPGGSLRLSCAASGFMFSGPGMSWVRQAPGKGLEWVASISGDGGSYIHYADSVKGRFTISRDNSKNTLYLQMNSLRAEDTAVYYCARLPYWGQGTLVTVSS

SEQ ID NO: 600 - protein, 113 aa, Artificial Sequence
  Synthetic construct
EVQLLESGGGLVQPGGSLRLSCAASGFRFSSPGMSWVRQAPGKGLEWVASISGDGGSYIHYADSVKGRFTISRDNSKNTLYLQMNSLRAEDTAVYYCARLPYWGQGTLVTVSS

SEQ ID NO: 601 - protein, 113 aa, Artificial Sequence
  Synthetic construct
EVQLLESGGGLVQPGGSLRLSCAASGFRFSGYGMSWVRQAPGKGLEWVASISGDGGSYIHYADSVKGRFTISRDNSKNTLYLQMNSLRAEDTAVYYCARLPYWGQGTLVTVSS

SEQ ID NO: 602 - protein, 113 aa, Artificial Sequence
  Synthetic construct
EVQLLESGGGLVQPGGSLRLSCAASGFTFSQVGMSWVRQAPGKGLEWVASISGDGGSYIHYADSVKGRFTISRDNSKNTLYLQMNSLRAEDTAVYYCARLPYWGQGTLVTVSS

SEQ ID NO: 603 - protein, 113 aa, Artificial Sequence
  Synthetic construct
EVQLLESGGGLVQPGGSLRLSCAASGFKFSGPGMSWVRQAPGKGLEWVASISGDGGSYIHYADSVKGRFTISRDNSKNTLYLQMNSLRAEDTAVYYCARLPYWGQGTLVTVSS

SEQ ID NO: 604 - protein, 113 aa, Artificial Sequence
  Synthetic construct
DIVMTQSPDSLAVSLGERATINCKSSQSLHRSGTQKDYLVWYQQKPGQPPKLLIYWASTRESGVPDRFSGSGSGTDFTLTISSLQAEDVAVYYCQQYNSYPLTFGQGTKVEIK

SEQ ID NO: 605 - protein, 113 aa, Artificial Sequence
  Synthetic construct
DIVMTQSPDSLAVSLGERATINCKSSQSLVRSGTQKDYLVWYQQKPGQPPKLLIYWASTRESGVPDRFSGSGSGTDFTLTISSLQAEDVAVYYCQQYNSYPLTFGQGTKVEIK

SEQ ID NO: 606 - protein, 113 aa, Artificial Sequence
  Synthetic construct
DIVMTQSPDSLAVSLGERATINCKSSQSLLRSGTQKDYLVWYQQKPGQPPKLLIYWASTRESGVPDRFSGSGSGTDFTLTISSLQAEDVAVYYCQQYNSYPLTFGQGTKVEIK

SEQ ID NO: 607 - protein, 113 aa, Artificial Sequence
  Synthetic construct
DIVMTQSPDSLAVSLGERATINCKSSQSLHYSGTQKDYLVWYQQKPGQPPKLLIYWASTRESGVPDRFSGSGSGTDFTLTISSLQAEDVAVYYCQQYNSYPLTFGQGTKVEIK

SEQ ID NO: 608 - protein, 113 aa, Artificial Sequence
  Synthetic construct
DIVMTQSPDSLAVSLGERATINCKSSQSLHNSGTQKDYLVWYQQKPGQPPKLLIYWASTRESGVPDRFSGSGSGTDFTLTISSLQAEDVAVYYCQQYNSYPLTFGQGTKVEIK

SEQ ID NO: 609 - protein, 113 aa, Artificial Sequence
  Synthetic construct
DIVMTQSPDSLAVSLGERATINCKSSQSLHMSGTQKDYLVWYQQKPGQPPKLLIYWASTRESGVPDRFSGSGSGTDFTLTISSLQAEDVAVYYCQQYNSYPLTFGQGTKVEIK

SEQ ID NO: 610 - protein, 113 aa, Artificial Sequence
  Synthetic construct
DIVMTQSPDSLAVSLGERATINCKSSQSLHQSGTQKDYLVWYQQKPGQPPKLLIYWASTRESGVPDRFSGSGSGTDFTLTISSLQAEDVAVYYCQQYNSYPLTFGQGTKVEIK

SEQ ID NO: 611 - protein, 113 aa, Artificial Sequence
  Synthetic construct
DIVMTQSPDSLAVSLGERATINCKSSQSLHKSGTQKDYLVWYQQKPGQPPKLLIYWASTRESGVPDRFSGSGSGTDFTLTISSLQAEDVAVYYCQQYNSYPLTFGQGTKVEIK

SEQ ID NO: 612 - protein, 113 aa, Artificial Sequence
  Synthetic construct
DIVMTQSPDSLAVSLGERATINCKSSQSLHLSGTQKDYLVWYQQKPGQPPKLLIYWASTRESGVPDRFSGSGSGTDFTLTISSLQAEDVAVYYCQQYNSYPLTFGQGTKVEIK

SEQ ID NO: 613 - protein, 113 aa, Artificial Sequence
  Synthetic construct
DIVMTQSPDSLAVSLGERATINCKSSQSLHRSGNQKDYLVWYQQKPGQPPKLLIYWASTRESGVPDRFSGSGSGTDFTLTISSLQAEDVAVYYCQQYNSYPLTFGQGTKVEIK

SEQ ID NO: 614 - protein, 113 aa, Artificial Sequence
  Synthetic construct
DIVMTQSPDSLAVSLGERATINCKSSQSLHRSGTQKNYLVWYQQKPGQPPKLLIYWASTRESGVPDRFSGSGSGTDFTLTISSLQAEDVAVYYCQQYNSYPLTFGQGTKVEIK

SEQ ID NO: 615 - protein, 113 aa, Artificial Sequence
  Synthetic construct
DIVMTQSPDSLAVSLGERATINCKSSQSLHRSGTQKDYLAWYQQKPGQPPKLLIYWASTRESGVPDRFSGSGSGTDFTLTISSLQAEDVAVYYCQQYNSYPLTFGQGTKVEIK

SEQ ID NO: 616 - protein, 113 aa, Artificial Sequence
  Synthetic construct
DIVMTQSPDSLAVSLGERATINCKSSQSLHRSGTQKDYLVWYQQKPGQPPKLLIYWASTRESGVPDRFSGSGSGTDFTLTISSLQAEDVAVYYCQQYSSYPLTFGQGTKVEIK

SEQ ID NO: 617 - protein, 10 aa, Artificial Sequence
  Synthetic construct
  MISC_FEATURE (1)..(1): Xaa = Gly or Val
  MISC_FEATURE (2)..(2): Xaa = Phe or Ile
  MISC_FEATURE (3)..(3): Xaa = Thr, Lys, Arg, Gln, or Met
  MISC_FEATURE (4)..(4): Xaa = Phe or Trp
  MISC_FEATURE (5)..(5): Xaa = Ser or Arg
  MISC_FEATURE (6)..(6): Xaa = Ser, Arg, Gly, Ile, Gln, Met, Leu, or Lys
  MISC_FEATURE (7)..(7): Xaa = Tyr, Val, or Pro
  MISC_FEATURE (9)..(9): Xaa = Met, Val, or Thr
XXXXXXXGXS

SEQ ID NO: 618 - protein, 17 aa, Artificial Sequence
  Synthetic construct
  MISC_FEATURE (4)..(4): Xaa = Gln or His
  MISC_FEATURE (7)..(7): Xaa = Leu, Tyr, His, or Val
  MISC_FEATURE (8)..(8): Xaa = Asn, Ser, Arg, Tyr, Gln, Met, Lys, or Leu
  MISC_FEATURE (9)..(9): Xaa = Ser or Ala
  MISC_FEATURE (10)..(10): Xaa = Gly or Arg
  MISC_FEATURE (11)..(11): Xaa = Asn, Arg, Lys, or Thr
  MISC_FEATURE (12)..(12): Xaa = Gln, His, or Arg
  MISC_FEATURE (13)..(13): Xaa = Lys or Gln
  MISC_FEATURE (14)..(14): Xaa = Asn, His, or Asp
  MISC_FEATURE (17)..(17): Xaa = Thr, Ala, or Val
KSSXSLXXXXXXXXYLX

SEQ ID NO: 619 - protein, 9 aa, Artificial Sequence
  Synthetic construct
  MISC_FEATURE (2)..(2): Xaa = Gln, Lys, or His
  MISC_FEATURE (4)..(4): Xaa = Asn, Asp, Arg, Tyr, or Ser
  MISC_FEATURE (5)..(5): Xaa = Ser, Thr, or Ala
  MISC_FEATURE (8)..(8): Xaa = Leu or Met
QXYXXYPXT

SEQ ID NO: 620 - protein, 10 aa, Artificial Sequence
  Synthetic construct
  MISC_FEATURE (1)..(1): Xaa = Gly, Val, or Arg
  MISC_FEATURE (2)..(2): Xaa = Phe or Ile
  MISC_FEATURE (3)..(3): Xaa = Thr, Lys, Arg, Gln, Met, or Asn
  MISC_FEATURE (4)..(4): Xaa = Phe, Trp, or Ile
  MISC_FEATURE (5)..(5): Xaa = Ser, Arg, Glu, or Lys
  MISC_FEATURE (6)..(6): Xaa = Ser, Arg, Gly, Ile, Gln, Met, Leu, Lys, or Asp
  MISC_FEATURE (7)..(7): Xaa = Tyr, Val, Pro, or Asp
  MISC_FEATURE (8)..(8): Xaa = Gly or Tyr
  MISC_FEATURE (9)..(9): Xaa = Met, Val, or Thr
  MISC_FEATURE (10)..(10): Xaa = Ser or His
XXXXXXXXXX

SEQ ID NO: 621 - protein, 17 aa, Artificial Sequence
  Synthetic construct
  MISC_FEATURE (5)..(5): Xaa = Asp, Glu, Thr, or Ser
  MISC_FEATURE (6)..(6): Xaa = Gly or Ala
  MISC_FEATURE (11)..(11): Xaa = His or Arg
  MISC_FEATURE (14)..(14): Xaa = Asp or Ser
  MISC_FEATURE (15)..(15): Xaa = Ser or Ala
SISGXXGSYIXYAXXVK

SEQ ID NO: 622 - protein, 5 aa, Artificial Sequence
  Synthetic construct
  MISC_FEATURE (1)..(1): Xaa = Ala, Thr,or Asn
  MISC_FEATURE (2)..(2): Xaa = Arg, Lys, or Thr
  MISC_FEATURE (4)..(4): Xaa = Pro or Arg
  MISC_FEATURE (5)..(5): Xaa = Tyr or Phe
XXLXX

SEQ ID NO: 623 - protein, 7 aa, Artificial Sequence
  Synthetic construct
  MISC_FEATURE (1)..(1): Xaa = Ser, Trp, Arg, or Leu
  MISC_FEATURE (2)..(2): Xaa = Ala, Met, or Val
  MISC_FEATURE (4)..(4): Xaa = Tyr, Thr, Phe, Asn, or Lys
  MISC_FEATURE (5)..(5): Xaa = Arg, Leu, or Lys
  MISC_FEATURE (6)..(6): Xaa = Tyr, His, Ala, or Glu
  MISC_FEATURE (7)..(7): Xaa = Ser or Thr
XXSXXXX

SEQ ID NO: 624 - protein, 9 aa, Artificial Sequence
  Synthetic construct
  MISC_FEATURE (1)..(1): Xaa = Gln, Ala, Val, or Pro
  MISC_FEATURE (2)..(2): Xaa = Gln, Lys, His, or Leu
  MISC_FEATURE (3)..(3): Xaa = Tyr, Met, Gly, or Ser
  MISC_FEATURE (4)..(4): Xaa = Asn, Asp, Arg, Tyr, Ser, Leu, or Thr
  MISC_FEATURE (5)..(5): Xaa = Ser, Thr, Ala, Glu, or His
  MISC_FEATURE (6)..(6): Xaa = Tyr, Arg, Phe, or Asp
  MISC_FEATURE (8)..(8): Xaa = Leu, Met, or Tyr
XXXXXXPXT

SEQ ID NO: 625 - protein, 217 aa, Artificial Sequence
  Synthetic construct
APELLGGPSVFLFPPKPKDTLMISRTPEVTCVVVDVSHEDPEVKFNWYVDGVEVHNAKTKPREEQYNSTYRVVSVLTVLHQDWLNGKEYKCKVSNKALPAPIEKTISKAKGQPREPQVYTLPPSRDELTKNQVSLTCLVKGFYPSDIAVEWESNGQPENNYKTTPPVLDSDGSFFLYSKLTVDKSRWQQGNVFSCSVLHEALHSHYTQKSLSLSPGK

SEQ ID NO: 626 - protein, 217 aa, Artificial Sequence
  Synthetic construct
APELLGGPSVFLFPPKPKDTLMISRTPEVTCVVVDVSHEDPEVKFNWYVDGVEVHNAKTKPREEQYNSTYRVVSVLTVLHQDWLNGKEYKCKVSNKALPAPIEKTISKAKGQPREPQVYTLPPSRDELTKNQVSLWCLVKGFYPSDIAVEWESNGQPENNYKTTPPVLDSDGSFFLYSKLTVDKSRWQQGNVFSCSVLHEALHSHYTQKSLSLSPGK

SEQ ID NO: 627 - protein, 217 aa, Artificial Sequence
  Synthetic construct
APEAAGGPSVFLFPPKPKDTLMISRTPEVTCVVVDVSHEDPEVKFNWYVDGVEVHNAKTKPREEQYNSTYRVVSVLTVLHQDWLNGKEYKCKVSNKALPAPIEKTISKAKGQPREPQVYTLPPSRDELTKNQVSLWCLVKGFYPSDIAVEWESNGQPENNYKTTPPVLDSDGSFFLYSKLTVDKSRWQQGNVFSCSVLHEALHSHYTQKSLSLSPGK

SEQ ID NO: 628 - protein, 217 aa, Artificial Sequence
  Synthetic construct
APEAAGGPSVFLFPPKPKDTLMISRTPEVTCVVVDVSHEDPEVKFNWYVDGVEVHNAKTKPREEQYNSTYRVVSVLTVLHQDWLNGKEYKCKVSNKALGAPIEKTISKAKGQPREPQVYTLPPSRDELTKNQVSLWCLVKGFYPSDIAVEWESNGQPENNYKTTPPVLDSDGSFFLYSKLTVDKSRWQQGNVFSCSVLHEALHSHYTQKSLSLSPGK

SEQ ID NO: 629 - protein, 217 aa, Artificial Sequence
  Synthetic construct
APELLGGPSVFLFPPKPKDTLMISRTPEVTCVVVDVSHEDPEVKFNWYVDGVEVHNAKTKPREEQYNSTYRVVSVLTVLHQDWLNGKEYKCKVSNKALPAPIEKTISKAKGQPREPQVYTLPPSRDELTKNQVSLSCAVKGFYPSDIAVEWESNGQPENNYKTTPPVLDSDGSFFLVSKLTVDKSRWQQGNVFSCSVLHEALHSHYTQKSLSLSPGK

SEQ ID NO: 630 - protein, 217 aa, Artificial Sequence
  Synthetic construct
APEAAGGPSVFLFPPKPKDTLMISRTPEVTCVVVDVSHEDPEVKFNWYVDGVEVHNAKTKPREEQYNSTYRVVSVLTVLHQDWLNGKEYKCKVSNKALPAPIEKTISKAKGQPREPQVYTLPPSRDELTKNQVSLSCAVKGFYPSDIAVEWESNGQPENNYKTTPPVLDSDGSFFLVSKLTVDKSRWQQGNVFSCSVLHEALHSHYTQKSLSLSPGK

SEQ ID NO: 631 - protein, 217 aa, Artificial Sequence
  Synthetic construct
APEAAGGPSVFLFPPKPKDTLMISRTPEVTCVVVDVSHEDPEVKFNWYVDGVEVHNAKTKPREEQYNSTYRVVSVLTVLHQDWLNGKEYKCKVSNKALGAPIEKTISKAKGQPREPQVYTLPPSRDELTKNQVSLSCAVKGFYPSDIAVEWESNGQPENNYKTTPPVLDSDGSFFLVSKLTVDKSRWQQGNVFSCSVLHEALHSHYTQKSLSLSPGK

SEQ ID NO: 632 - protein, 5 aa, Artificial Sequence
  Synthetic construct
AAGHV

SEQ ID NO: 633 - protein, 7 aa, Artificial Sequence
  Synthetic construct
  MISC_FEATURE (4)..(4): Xaa = Thr or Tyr
  MISC_FEATURE (6)..(6): Xaa = Glu or Tyr
WASXRXS

SEQ ID NO: 634 - protein, 9 aa, Artificial Sequence
  Synthetic construct
  MISC_FEATURE (4)..(4): Xaa = Asn or Ser
  MISC_FEATURE (5)..(5): Xaa = Ser or Thr
QQYXXYPLT

SEQ ID NO: 635 - protein, 7 aa, Artificial Sequence
  Synthetic construct
  misc_feature (2)..(2): Xaa can be any naturally occurring amino acid
YXTEWSS

SEQ ID NO: 636 - protein, 9 aa, Artificial Sequence
  Synthetic construct
  misc_feature (2)..(3): Xaa can be any naturally occurring amino acid
  misc_feature (5)..(8): Xaa can be any naturally occurring amino acid
TXXEXXXXF
